(19) United States
(12) Patent Application Publication
(10) Pub. No.: US 2007/0037144 A1
(43) Pub. Date: Feb. 15, 2007

(54) Leukocyte expression profiling

(76) Inventors: Jay Wohlgemuth, Palo Alto, CA (US); Kirk Fry, Palo Alto, CA (US); George Matcuk, Stanford, CA (US); Peter Altman, Albany, CA (US); James Prentice, San Francisco, CA (US); Julie Phillips, Pacifica, CA (US); Ngoc Ly, San Bruno, CA (US); Robert Woodward, Pleasanton, CA (US); Thomas Quertermous, Portola Valley, CA (US); Frances Johnson, Portola Valley, CA (US)

Correspondence Address: Michael R. Ward;MORRISON & FOERSTER LLP, 425 Market Street, San Francisco, CA, 94105, US

(21) Appl. No.: 10/006,290

(22) Filed: Oct. 22, 2001

Related U.S. Application Data
(60) Provisional application No. 60/296,764, filed on Jun. 8, 2001.
(60) Provisional application No. 60/241,994, filed on Oct. 20, 2000.

(51) Int. Cl. C12Q 1/68; C12M 1/34

(52) U.S. Cl. 435/6; 435/287.2

(57) ABSTRACT

Leukocyte gene expression profiling is utilized to identify oligonucleotides from gene expression candidate libraries. The expression libraries are generally immobilized on an array. Diagnostic oligonucleotide sets for analysis of leukocyte-related diseases are described.

### RELATED APPLICATIONS

[0001] This application claims the benefit under 35 U.S.C. §119(e) of U.S. provisional patent application No. 60/241,994 filed Oct. 20, 2000 and U.S. provisional patent application No. 60/296,764 filed Jun. 8, 2001 which are hereby incorporated by reference in their entirety.

### FIELD OF THE INVENTION

[0002] This invention is in the field of expression profiling. In particular, this invention is in the field of leukocyte expression profiling.

### BACKGROUND OF THE INVENTION

[0003] Many of the current shortcomings in diagnosis, prognosis, risk stratification and treatment of disease can be approached through the identification of the molecular mechanisms underlying a disease and through the discovery of nucleotide sequences (or sets of nucleotide sequences) whose expression patterns predict the occurrence or progression of disease states, or predict a patient's response to a particular therapeutic intervention. In particular, identification of nucleotide sequences and sets of nucleotide sequences with such predictive value from cells and tissues that are readily accessible would be extremely valuable. For example, peripheral blood is attainable from all patients and can easily be obtained at multiple time points at low cost. This is a desirable contrast to most other cell and tissue types, which are less readily accessible, or accessible only through invasive and aversive procedures. In addition, the various cell types present in circulating blood are ideal for expression profiling experiments as the many cell types in the blood specimen can be easily separated if desired prior to analysis of gene expression. While blood provides a very attractive substrate for the study of diseases using expression profiling techniques, and for the development of diagnostic technologies and the identification of therapeutic targets, the value of expression profiling in blood samples rests on the degree to which changes in gene expression in these cell types are associated with a predisposition to, and pathogenesis and progression of a disease.

[0004] There is an extensive literature supporting the role of leukocytes, e.g., T-and B-lymphocytes, monocytes and granulocytes, including neutrophils, in a wide range of disease processes, including such broad classes as cardiovascular diseases, inflammatory, autoimmune and rheumatic diseases, infectious diseases, transplant rejection, cancer and malignancy, and endocrine diseases. For example, among cardiovascular diseases, such commonly occurring diseases as atherosclerosis, restenosis, transplant vasculopathy and acute coronary syndromes all demonstrate significant T cell involvement (Smith-Norowitz et al. (1999) Clin Immunol 93:168-175; Jude et al. (1994) Circulation 90:1662-8; Belch et al. (1997) Circulation 95:2027-31). These diseases are now recognized as manifestations of chronic inflammatory disorders resulting from an ongoing response to an injury process in the arterial tree (Ross et al. (1999) Ann Thorac Surg 67:1428-33). Differential expression of lymphocyte, monocyte and neutrophil genes and their products has been demonstrated clearly in the literature. Particularly interesting are examples of differential expression in circulating cells of the immune system that demonstrate specificity for a particular disease, such as arteriosclerosis, as opposed to a generalized association with other inflammatory diseases, or for example, with unstable angina rather than quiescent coronary disease.

[0005] A number of individual genes, e.g., CD11b/CD18 (Kassirer et al. (1999) Am Heart J 138:555-9); leukocyte elastase (Amaro et al. (1995) Eur Heart J 16:615-22; and CD40L (Aukrust et al. (1999) Circulation 100:614-20) demonstrate some degree of sensitivity and specificity as markers of various vascular diseases. In addition, the identification of differentially expressed target and fingerprint genes isolated from purified populations of monocytes manipulated in various in vitro paradigms has been proposed for the diagnosis and monitoring of a range of cardiovascular diseases, see, e.g., U.S. Pat. Nos. 6,048,709; 6,087,477; 6,099,823; and 6,124,433 “COMPOSITIONS AND METHODS FOR THE TREATMENT AND DIAGNOSIS OF CARDIOVASCULAR DISEASE” to Falb (see also, WO 97/30065). Lockhart, in U.S. Pat. No. 6,033,860 “EXPRESSION PROFILES IN ADULT AND FETAL ORGANS” proposes the use of expression profiles for a subset of identified genes in the identification of tissue samples, and the monitoring of drug effects.

[0006] The accuracy of technologies based on expression profiling for the diagnosis, prognosis, and monitoring of disease would be dramatically increased if numerous differentially expressed nucleotide sequences, each with a measure of specificity for a disease in question, could be identified and assayed in a concerted manner. In order to achieve this improved accuracy, the appropriate sets of nucleotide sequences need to be identified and validated against numerous samples in combination with relevant clinical data. The present invention addresses these and other needs, and applies to any disease or disease state for which differential regulation of genes, or other nucleotide sequences, of peripheral blood can be demonstrated.

### SUMMARY OF THE INVENTION

[0007] The present invention is thus directed to a system for detecting differential gene expression. In one format, the system has one or more isolated DNA molecules wherein each isolated DNA molecule detects expression of a gene selected from the group of genes corresponding to the oligonucleotides depicted in the Sequence Listing. It is understood that the DNA sequences and oligonucleotides of the invention may have slightly different sequences that those identified herein. Such sequence variations are understood to those of ordinary skill in the art to be variations in the sequence which do not significantly affect the ability of the sequences to detect gene expression.

[0008] The sequences encompassed by the invention have at least 40-50, 50-60, 70-80, 80-85, 85-90, 90-95 or 95-100% sequence identity to the sequences disclosed herein. In some embodiments, DNA molecules are less than about any of the following lengths (in bases or base pairs): 10,000; 5,000; 2500; 2000; 1500; 1250; 1000; 750; 500; 300; 250; 200; 175; 150; 125; 100; 75; 50; 25; 10. In some embodiments, DNA molecule is greater than about any of the following lengths (in bases or base pairs): 10; 15; 20; 25; 30; 40; 50; 60; 75; 100; 125; 150; 175; 200; 250; 300; 350; 400; 500; 750; 1000; 2000; 5000; 7500; 10000; 20000; 50000. Alternately, a DNA molecule can be any of a range of sizes having an upper limit of 10,000; 5,000; 2500; 2000; 1500; 1250; 1000; 750; 500; 300; 250; 200; 175; 150; 125; 100; 75; 50; 25; or 10 and an independently selected lower limit of 10; 15; 20; 25; 30; 40; 50; 60; 75; 100; 125; 150; 175; 200; 250; 300; 350; 400; 500; 750; 1000; 2000; 5000; 7500 wherein the lower limit is less than the upper limit.

[0009] The gene expression system may be a candidate library, a diagnostic agent, a diagnostic oligonucleotide set or a diagnostic probe set. The DNA molecules may be genomic DNA, protein nucleic acid (PNA), cDNA or synthetic oligonucleotides.

[0010] In one format, the gene expression system is immobilized on an array. The array may be a chip array, a plate array, a bead array, a pin array, a membrane array, a solid surface array, a liquid array, an oligonucleotide array, a polynucleotide array, a cDNA array, a microfilter plate, a membrane or a chip.

[0011] In one format, the genes detected by the gene expression system are selected from the group of genes corresponding to the oligonucleotides depicted in SEQ ID NO:2476, SEQ ID NO: 2407, SEQ ID NO:2192, SEQ ID NO: 2283, SEQ ID NO:6025, SEQ ID NO: 4481, SEQ ID NO:3761, SEQ ID NO: 3791, SEQ ID NO:4476, SEQ ID NO: 4398, SEQ ID NO:7401, SEQ ID NO: 1796, SEQ ID NO:4423, SEQ ID NO: 4429, SEQ ID NO:4430, SEQ ID NO: 4767, SEQ ID NO:4829 and SEQ ID NO: 8091.

[0012] The present invention is further directed to a diagnostic agent comprising an oligonucleotide wherein the oligonucleotide has a nucleotide sequence selected from the Sequence Listing wherein the oligonucleotide detects expression of a gene that is differentially expressed in leukocytes in an individual over time. In one format, the oligonucleotide has a nucleotide sequence selected from the group consisting of SEQ ID NO:2476, SEQ ID NO: 2407, SEQ ID NO:2192, SEQ ID NO: 2283, SEQ ID NO:6025, SEQ ID NO: 4481, SEQ ID NO:3761, SEQ ID NO: 3791, SEQ ID NO:4476, SEQ ID NO: 4398, SEQ ID NO:7401, SEQ ID NO: 1796, SEQ ID NO:4423, SEQ ID NO: 4429, SEQ ID NO:4430, SEQ ID NO: 4767, SEQ ID NO:4829 and SEQ ID NO: 8091

[0013] The present invention is futher directed to a system for detecting gene expression in leukocytes comprising an isolated DNA molecule wherein the isolated DNA molecule detects expression of a gene wherein the gene is selected from the group of genes corresponding to the oligonucleotides depicted in the Sequence Listing and the gene is differentially expressed in the leukocytes in an individual with at least one disease criterion for a disease selected from Table 1 as compared to the expression of the gene in leukocytes in an individual without the at least one disease criterion.

[0014] The present invention is further directed to a gene expression candidate library comprising at least two oligonucleotides wherein the oligonucleotides have a sequence selected from those oligonucleotide sequences listed in Table 2, Table 3, and the Sequence Listing. Table 3 encompasses Tables 3A, 3B and 3C. The oligonucleotides of the candidate library may comprise deoxyribonucleic acid (DNA), ribonucleic acid (RNA), protein nucleic acid (PNA), synthetic oligonucleotides, or genomic DNA.

[0015] In one embodiment, the candidate library is immobilized on an array. The array may comprises one or more of: a chip array, a plate array, a bead array, a pin array, a membrane array, a solid surface array, a liquid array, an oligonucleotide array, a polynucleotide array or a cDNA array, a microtiter plate, a pin array, a bead array, a membrane or a chip. Individual members of the libraries are may be separately immobilized.

[0016] The present invention is further directed to a diagnostic oligonucleotide set for a disease having at least two oligonucleotides wherein the oligonucleotides have a sequence selected from those oligonucleotide sequences listed in Table 2, Table 3, or the Sequence Listing which are differentially expressed in leukocytes genes in an individual with at least one disease criterion for at least one leukocyte-related disease as compared to the expression in leukocytes in an individual without the at least one disease criterion, wherein expression of the two or more genes of the gene expression library is correlated with at least one disease criterion.

[0017] The present invention is further directed to a diagnostic oligonucleotide set for a disease having at least one oligonucleotide wherein the oligonucleotide has a sequence selected from those sequences listed in Table 2, Table 3, or the sequence listing which is differentially expressed in leukocytes in an individual with at least one disease criterion for a disease selected from Table 1 as compared toleukocytes in an individual without at least one disease criterion, wherein expression of the at least one gene from the gene expression library is correlated with at least one disease criterion, wherein the differential expression of the at least one gene has not previously been described. In one format, two or more oligonucleotides are utilized.

[0018] In the diagnostic oligonucleotide sets of the invention the disease criterion may include data selected from patient historic, diagnostic, prognostic, risk prediction, therapeutic progress, and therapeutic outcome data. This includes lab results, radiology results, pathology results such as histology, cytology and the like, physical examination findings, and medication lists.

[0019] In the diagnostic oligonucleotide sets of the invention the leukocytes comprise peripheral blood leukocytes or leukocytes derived from a non-blood fluid. The non-blood fluid may be selected from colon, sinus, spinal fluid, saliva, lymph fluid, esophagus, small bowel, pancreatic duct, biliary tree, ureter, vagina, cervix uterus and pulmonary lavage fluid.

[0020] In the diagnostic oligonucleotide sets of the invention the leukocytes may include leukocytes derived from urine or a joint biopsy sample or biopsy of any other tissue or may be T-lymphocytes.

[0021] In the diagnostic oligonucleotide sets of the invention the disease may be selected from cardiac allograft rejection, kidney allograft rejection, liver allograft rejection, atherosclerosis, congestive heart failure, systemic lupus erythematosis (SLE), rheumatoid arthritis, osteoarthritis, and cytomegalovirus infection.

[0022] The diagnostic oligonucleotide sets of the invention may further include one or more cytomegalovirus (CMV) nucleotide sequences, wherein expression of the CMV nucleotide sequence is correlated with CMV infection.

[0023] The diagnostic nucleotide sets of the invention may further include one or more Epstein-Barr virus (EBV) nucleotide sequences, wherein expression of the one or more EBV nucleotide sequences is correlated with EBV infection.

[0024] In the present invention, expression may be differential expression, wherein the differential expression is one or more of a relative increase in expression, a relative decrease in expression, presence of expression or absence of expression, presence of disease or absence of disease. The differential expression may be RNA expression or protein expression. The differential expression may be between two or more samples from the same patient taken on separate occasions or between two or more separate patients or between two or more genes relative to each other.

[0025] The present invention is further directed to a diagnostic probe set for a disease where the probes correspond to at least one oligonucleotide wherein the oligonucleotides have a sequence ssuch as those listed in Table 2, Table 3, or the Sequence Listing which is differentially expressed in leukocytes in an individual with at least one disease criterion for a disease selected from Table 1 as comapared to leukocytes in an individual without the at least one disease criterion, wherein expression of the oligonucleotide is correlated with at least one disease criterion, and further wherein the differential expression of the at least one nucleotide sequence has not previously been described.

[0026] The present invention is further directed to a diagnostic probe set wherein the probes include one or more of probes useful for proteomics and probes for nucleic acids cDNA, or synthetic oligonucleotides.

[0027] The present invention is further directed to an isolated nucleic acid having a sequences such as those listed in Table 3B or Table 3C or the Sequence Listing.

[0028] The present invention is further directed to polypeptides wherein the polypeptides are encoded by the nucleic acid sequences in Tables 3B, 3C and the Sequence Listing.

[0029] The present invention is further directed to a polynucleotide expression vector containing the polynucleotide of Tables 3B-3C or the Sequence Listing in operative association with a regulatory element which controls expression of the polynucleotide in a host cell. The present invention is further directed to host cells transformed with the expression vectors of the invention. The host cell may be prokaryotic or eukaryotic.

[0030] The present invention is further directed to fusion proteins produced by the host cells of the invention. The present invention is further directed to antibodies directed to the fusion proteins of the invention. The antibodies may be monoclonal or polyclonal antibodies.

[0031] The present invention is further directed to kits comprising the diagnostic oligonucleotide sets of the invention. The kits may include instructions for use of the kit.

[0032] The present invention is further directed to a method of diagnosing a disease by obtaining a leukocyte sample from an individual, hybridizing nucleic acid derived from the leukocyte sample with a diagnostic oligonucleotide set, and comparing the expression of the diagnostic oligonucleotide set with a molecular signature indicative of the presence or absence of the disease.

[0033] The present invention is further directed to a method of detecting gene expression by a) isolating RNA and b) hybridizing the RNA to isolated DNA molecules wherein the isolated DNA molecules detect expression of a gene wherein the gene corresponds to one of the oligonucleotides depicted in the Sequence Listing.

[0034] The present invention is further directed to a method of detecting gene expression by a) isolating RNA; b) converting the RNA to nucleic acid derived from the RNA and c) hybridizing the nucleic acid derived from the RNA to isolated DNA molecules wherein the isolated DNA molecules detect expression of a gene wherein the gene corresponds to one of the oligonucleotides depicted in the Sequence Listing. In one format, the nucleic acid derived from the RNA is cDNA.

[0035] The present invention is further directed to a method of detecting gene expression by a) isolating RNA; b) converting the RNA to cRNA or aRNA and c) hybridizing the cRNA or aRNA to isolated DNA molecules wherein the isolated DNA molecules detect expression of a gene corresponding to one of the oligonucleotides depicted in the Sequence Listing.

[0036] The present invention is further directed to a method of monitoring progression of a disease by obtaining a leukocyte sample from an individual, hybridizing the nucleic acid derived from leukocyte sample with a diagnostic oligonucleotide set, and comparing the expression of the diagnostic oligonucleotide set with a molecular signature indicative of the presence or absence of disease progression.

[0037] The present invention is further directed to a method of monitoring the rate of progression of a disease by obtaining a leukocyte sample from an individual, hybridizing the nucleic acid derived from leukocyte sample with a diagnostic oligonucleotide set, and comparing the expression of the diagnostic oligonucleotide set with a molecular signature indicative of the presence or absence of disease progression.

[0038] The present invention is further directed to a method of predicting therapeutic outcome by obtaining a leukocyte sample from an individual, hybridizing the nucleic acid derived from leukocyte sample with a diagnostic oligonucleotide set, and comparing the expression of the diagnostic oligonucleotide set with a molecular signature indicative of the predicted therapeutic outcome.

[0039] The present invention is further directed to a method of determining prognosis by obtaining a leukocyte sample from an individual, hybridizing the nucleic acid derived from leukocyte sample with a diagnostic oligonucleotide set, and comparing the expression of the diagnostic oligonucleotide set with a molecular signature indicative of the prognosis.

[0040] The present invention is further directed to a method of predicting disease complications by obtaining a leukocyte sample from an individual, hybridizing nucleic acid derived from the leukocyte sample with a diagnostic oligonucleotide set, and comparing the expression of the diagnostic oligonucleotide set with a molecular signature indicative of the presence or absence of disease complications.

[0041] The present invention is further directed to a method of monitoring response to treatment, by obtaining a leukocyte sample from an individual, hybridizing the nucleic acid derived from leukocyte sample with a diagnostic oligonucleotide set, and comparing the expression of the diagnostic oligonucleotide set with a molecular signature indicative of the presence or absence of response to treatment.

[0042] In the methods of the invention the invention may further include characterizing the genotype of the individual, and comparing the genotype of the individual with a diagnostic genotype, wherein the diagnostic genotype is correlated with at least one disease criterion. The genotype may be analyzed by one or more methods selected from the group consisting of Southern analysis, RFLP analysis, PCR, single stranded conformation polymorphism and SNP analysis.

[0043] The present invention is further directed to a method of non-invasive imaging by providing an imaging probe for a nucleotide sequence that is differentially expressed in leukocytes from an individual with at least one disease criterion for at least one leukocyte-implicated disease where leukocytes localize at the site of disease, wherein the expression of the at least one nucleotide sequence is correlated with the at least one disease criterion by (a) contacting the probe with a population of leukocytes; (b) allowing leukocytes to localize to the site of disease or injury and (c) detecting an image.

[0044] The present invention is further directed to a control RNA for use in expression profile analysis, where the RNA extracted from the buffy coat samples is from at least four individuals.

[0045] The present invention is further directed to a method of collecting expression profiles, comprising comparing the expression profile of an individual with the expression profile of buffy coat control RNA, and analyzing the profile.

[0046] The present invention is further directed to a method of RNA preparation suitable for diagnostic expression profiling by obtaining a leukocyte sample from a subject, adding actinomycin-D to a final concentration of 1 ug/ml, adding cycloheximide to a final concentration of 10 ug/ml, and extracting RNA from the leukocyte sample. In the method of RNA preparation of the invention the actinomycin-D and cycloheximide may be present in a sample tube to which the leukocyte sample is added. The method may further include centrifuging the sample at 4° C. to separate mononuclear cells.

[0047] The present invention is further directed to a leukocyte oligonucleotide set including at least two oligonucleotides which are differentially expressed in leukocytes undergoing adhesion to an endothelium relative to expression in leukocytes not undergoing adhesion to an endothelium, wherein expression of the two oligonucleotides is correlated with the at least one indicator of adhesion state.

[0048] The present invention is further directed to a method of identifying at least one diagnostic probe set for assessing atherosclerosis by (a) providing a library of candidate oligonucleotides, which candidate oligonucleotides are differentially expressed in leukocytes which are undergoing adhesion to an endothelium relative to their expression in leukocytes that are not undergoing adhesion to an endothelium; (b) assessing expression of two or more oligonucleotides, which two or more oligonucleotides correspond to components of the library of candidate oligonucleotides, in a subject sample of leukocytes; (c) correlating expression of the two or more oligonucleotides with at least one criterion, which criterion includes one or more indicators of adhesion to an endothelium; and, (d) recording the molecular signature in a database.

[0049] The present invention is further directed to a method of identifying at least one diagnostic probe set for assessing atherosclerosis by (a) providing a library of candidate oligonucleotides, which candidate oligonucleotides are differentially expressed in leukocytes which are undergoing adhesion to an endothelium relative to their expression in leukocytes that are not undergoing adhesion to an endothelium; (b) assessing expression of two or more oligonucleotides, which two or more oligonucleotides correspond to components of the library of candidate nucleotide sequences, in a subject sample of epithelial cells; (c) correlating expression of the two or more nucleotide sequences with at least one criterion, which criterion comprises one or more indicator of adhesion to an endothelium; and (d) recording the molecular signature in a database.

[0050] The present invention is further directed to methods of leukocyte expression profiling including methods of analyzing longitudinal clinical and expression data. The rate of change and/or magnitude and direction of change of gene expression can be correlated with disease states and the rate of change of clinical conditions/data and/or the magnitude and direction of changes in clinical data. Correlations may be discovered by examining these expression or clinical changes that are not found in the absence of such changes.

[0051] The present invention is further directed to methods of leukocyte profiling for analysis and/or detection of one or more viruses. The virus may be CMV, HIV, hepatitis or other viruses. Both viral and human leukocyte genes can be subjected to expression profiling for these purposes.

### BRIEF DESCRIPTION OF THE SEQUENCE LISTING

[0052] The table below gives a description of the sequence listing. There are 8830 entries. The Sequence Listing presents 50mer oligonucleotide sequences derived from human leukocyte, plant and viral genes. These are listed as SEQ IDs 1-8143. The 50mer sequences and their sources are also displayed in Table 8. Most of these 50mers were designed from sequences of genes in Tables 2, 3A, B and C and the Sequence listing.

[0053] SEQ IDs 8144-8766 are the cDNA sequences derived from human leukocytes that were not homologous to UniGene sequences or sequences found in dbEST at the time they were searched. Some of these sequences match human genomic sequences and are listed in Tables 3B and C. The remaining clones are putative cDNA sequences that contained less than 50% masked nucleotides when submitted to RepeatMasker, were longer than 147 nucleotides, and did not have significant similarity to the UniGene Unique database, dbEST, the NR nucleotide database of Genbank or the assembled human genome of Genbank.

[0054] SEQ IDs 8767-8770, 8828-8830 and 8832 are sequences that appear in the text and examples (primer, masked sequences, exemplary sequences, etc.).

[0055] SEQ IDs 8771-8827 are CMV PCR primers described in Example 17.

### BRIEF DESCRIPTION OF THE FIGURES

[0056] FIG. 1: FIG. 1 is a schematic flow chart illustrating a schematic instruction set for characterization of the nucleotide sequence and/or the predicted protein sequence of novel nucleotide sequences.

[0057] FIG. 2: FIG. 2 depicts the components of an automated RNA preparation machine.

[0058] FIG. 3: FIG. 3 describes kits useful for the practice of the invention. FIG. 3A describes the contents of a kit useful for the discovery of diagnostic nucleotide sets. FIG. 3B describes the contents of a kit useful for the application of diagnostic nucleotide sets.

[0059] FIG. 4 shows the results of six hybridizations on a mini array graphed (n=6 for each column). The error bars are the SEM. This experiment shows that the average signal from AP prepared RNA is 47% of the average signal from GS prepared RNA for both Cy3 and Cy5.

[0060] FIG. 5 shows the average background subtracted signal for each of nine leukocyte-specific genes on a mini array. This average is for 3-6 of the above-described hybridizations for each gene. The error bars are the SEM.

[0061] FIG. 6 shows the ratio of Cy3 to Cy5 signal for a number of genes. After normalization, this ratio corrects for variability among hybridizations and allows comparison between experiments done at different times. The ratio is calculated as the Cy3 background subtracted signal divided by the Cy5 background subtracted signal. Each bar is the average for 3-6 hybridizations. The error bars are SEM.

[0062] FIG. 7 shows data median Cy3 background subtracted signals for control RNAs using mini arrays.

[0063] FIG. 8 shows data from an array hybridization.

[0064] FIG. 9 shows a comparison of gene expression in samples obtained from cardiac transplant patients wth low rejection grade and high rejection grade.

[0065] FIG. 10 shows differential gene expression between samples from patients with grade 0 and grade 3A rejection.

### BRIEF DESCRIPTION OF THE TABLES

[0066] Table 1: Table 1 lists diseases or conditions amenable to study by leukocyte profiling.

[0067] Table 2: Table 2 describes genes and other nucleotide sequences identified using data mining of publically available publication databases and nucleotide sequence databases. Corresponding Unigene (build 133) cluster numbers are listed with each gene or other nucleotide sequence.

[0068] Table 3A: Table 3A describes 48 clones whose sequences align to two or more non-contiguous sequences on the same assembled human contig of genomic sequence. The Accession numbers are from the Mar. 15, 2001 build of the human genome. The file date for the downloaded data was Apr. 17, 2001. The alignments of the clone and the contig are indicated in the table. The start and stop offset of each matching region is indicated in the table. The sequence of the clones themselves is included in the sequence listing. The alignments of these clones strongly suggest that they are novel nucleotide sequences. Furthermore, no EST or mRNA aligning to the clone was found in the database. These sequences may prove useful for the prediction of clinical outcomes.

[0069] Table 3B: Table 3B describes Identified Genomic Regions that code for novel mRNAs. The table contains 591 identified genomic regions that are highly similar to the cDNA clones. Those regions that are within ˜100 to 200 Kb of each other on the same contig are likely to represent exons of the same gene. The indicated clone is exemplary of the cDNA clones that match the indicated genomic region. The “number clones” column indicates how many clones were isolated from the libraries that are similar to the indicated region of the chromosome. The probability number is the likelihood that region of similarity would occur by chance on a random sequence. The Accession numbers are from the Mar. 15, 2001 build of the human genome. The file date for the downloaded data was Apr. 17, 2001. These sequences may prove useful for the prediction of clinical outcomes.

[0070] Table 3C: Table 3C describes differentially expressed nucleotide sequences useful for the prediction of clinical outcomes. This table contains 4517 identified cDNAs and cDNA regions of genes that are members of a leukocyte candidate library, for use in measuring the expression of nucleotide sequences that could subsequently be correlated with human clinical conditions. The regions of similarity were found by searching three different databases for pair wise similarity using blastn. The three databases were UniGene Unique build Mar. 30, 2001, file Hs.seq.uniq.Z; the downloadable database at ftp.ncbi.nlm.nih.corn/blast/db/est human.Z with date Apr. 8, 2001 which is a section of Genbank version 122; and the non-redundant section of Genbank ver 123. The Hs.XXXXX numbers represent UniGene accession numbers from the Hs.seq.uniq.Z file of Mar. 30, 2001. The clone sequences are not in the sequence listing.

[0071] Table 4: Table 4 describes patient groups and diagnostic gene sets

[0072] Table 5: Table 5 describes the nucleotide sequence databases used in the sequence analysis described herein.

[0073] Table 6: Table 6 describes the algorithms and software packages used for exon and polypeptide prediction used in the sequence analysis described herein.

[0074] Table 7: Table 7 describes the databases and algorithms used for the protein sequence analysis described herein.

[0075] Table 8: Table 8 describes leukocyte probes spotted on the microarrays.

[0076] Table 9: Table 9 describes Cardiac Transplant patient RNA samples and array hybridizations.

[0077] Table 10: Table 10 describes differentially expressed probes identified when comparing leukocyte expression profiles obtained from high and low grade cardiac transplant rejection patients.

### DETAILED DESCRIPTION OF THE INVENTION

Definitions

[0078] Unless defined otherwise, all scientific and technical terms are understood to have the same meaning as commonly used in the art to which they pertain. For the purpose of the present invention, the following terms are defined below.

[0079] In the context of the invention, the term “gene expression system” refers to any system, device or means to detect gene expression and includes diagnostic agents, candidate libraries, oligonucleotide sets or probe sets.

[0080] The term “diagnostic oligonucleotide set” generally refers to a set of two or more oligonucleotides that, when evaluated for differential expression of their products, collectively yields predictive data. Such predictive data typically relates to diagnosis, prognosis, monitoring of therapeutic outcomes, and the like. In general, the components of a diagnostic oligonucleotide set are distinguished from nucleotide sequences that are evaluated by analysis of the DNA to directly determine the genotype of an individual as it correlates with a specified trait or phenotype, such as a disease, in that it is the pattern of expression of the components of the diagnostic nucleotide set, rather than mutation or polymorphism of the DNA sequence that provides predictive value. It will be understood that a particular component (or member) of a diagnostic nucleotide set can, in some cases, also present one or more mutations, or polymorphisms that are amenable to direct genotyping by any of a variety of well known analysis methods, e.g., Southern blotting, RFLP, AFLP, SSCP, SNP, and the like.

[0081] A “disease specific target oligonucleotide sequence” is a gene or other oligonucleotide that encodes a polypeptide, most typically a protein, or a subunit of a multi-subunit protein, that is a therapeutic target for a disease, or group of diseases.

[0082] A “candidate library” or a “candidate oligonucleotide library” refers to a collection of oligonucleotide sequences (or gene sequences) that by one or more criteria have an increased probability of being associated with a particular disease or group of diseases. The criteria can be, for example, a differential expression pattern in a disease state or in activated or resting leukocytes in vitro as reported in the scientific or technical literature, tissue specific expression as reported in a sequence database, differential expression in a tissue or cell type of interest, or the like. Typically, a candidate library has at least 2 members or components; more typically, the library has in excess of about 10, or about 100, or about 1000, or even more, members or components.

[0083] The term “disease criterion” is used herein to designate an indicator of a disease, such as a diagnostic factor, a prognostic factor, a factor indicated by a medical or family history, a genetic factor, or a symptom, as well as an overt or confirmed diagnosis of a disease associated with several indicators such as those selected from the above list. A disease criterian includes data describing a patient's health status, including retrospective or prospective health data, e.g. in the form of the patient's medical history, laboratory test results, diagnostic test result, clinical events, medications, lists, response(s) to treatment and risk factors, etc.

[0084] The terms “molecular signature” or “expression profile” refers to the collection of expression values for a plurality (e.g., at least 2, but frequently about 10, about 100, about 1000, or more) of members of a candidate library. In many cases, the molecular signature represents the expression pattern for all of the nucleotide sequences in a library or array of candidate or diagnostic nucleotide sequences or genes. Alternatively, the molecular signature represents the expression pattern for one or more subsets of the candidate library. The term “oligonucleotide” refers to two or more nucleotides. Nucleotides may be DNA or RNA, naturally occurring or synthetic.

[0085] The term “healthy individual,” as used herein, is relative to a specified disease or disease criterion. That is, the individual does not exhibit the specified disease criterion or is not diagnosed with the specified disease. It will be understood, that the individual in question, can, of course, exhibit symptoms, or possess various indicator factors for another disease.

[0086] Similarly, an “individual diagnosed with a disease” refers to an individual diagnosed with a specified disease (or disease criterion). Such an individual may, or may not, also exhibit a disease criterion associated with, or be diagnosed with another (related or unrelated) disease.

[0087] An “array” is a spatially or logically organized collection, e.g., of oligonucleotide sequences or nucleotide sequence products such as RNA or proteins encoded by an oligonucleotide sequence. In some embodiments, an array includes antibodies or other binding reagents specific for products of a candidate library.

[0088] When referring to a pattern of expression, a “qualitative” difference in gene expression refers to a difference that is not assigned a relative value. That is, such a difference is designated by an “all or nothing” valuation. Such an all or nothing variation can be, for example, expression above or below a threshold of detection (an on/off pattern of expression). Alternatively, a qualitative difference can refer to expression of different types of expression products, e.g., different alleles (e.g., a mutant or polymorphic allele), variants (including sequence variants as well as post-translationally modified variants), etc.

[0089] In contrast, a “quantitative” difference, when referring to a pattern of gene expression, refers to a difference in expression that can be assigned a value on a graduated scale, (e.g., a 0-5 or 1-10 scale, a +-+++scale, a grade 1-grade 5 scale, or the like; it will be understood that the numbers selected for illustration are entirely arbitrary and in no-way are meant to be interpreted to limit the invention).

[0090] Gene Expression Systems of the Invention

[0091] The invention is directed to a gene expression system having one or more DNA molecules wherein the one or more DNA molecules has a nucleotide sequence which detects expression of a gene corresponding to the oligonucleotides depicted in the Sequence Listing. In one format, the oligonucleotide detects expression of a gene that is differentially expressed in leukocytes. The gene expression system may be a candidate library, a diagnostic agent, a diagnostic oligonucleotide set or a diagnostic probe set. The DNA molecules may be genomic DNA, protein nucleic acid (PNA), cDNA or synthetic oligonucleotides. Following the procedures taught herein, one can identity sequences of interest for analyzing gene expression in leukocytes. Such sequences may be predictive of a disease state.

[0092] Diagnostic Oligonucleotides of the Invention

[0093] The invention relates to diagnostic nucleotide set(s) comprising members of the leukocyte candidate library listed in Table 2, Table 3 and in the Sequence Listing, for which a correlation exists between the health status of an individual, and the individual's expression of RNA or protein products corresponding to the nucleotide sequence. In some instances, only one oligonucleotide is necessary for such detection. Members of a diagnostic oligonucleotide set may be identified by any means capable of detecting expression of RNA or protein products, including but not limited to differential expression screening, PCR, RT-PCR, SAGE analysis, high-throughput sequencing, microarrays, liquid or other arrays, protein-based methods (e.g., western blotting, proteomics, and other methods described herein), and data mining methods, as further described herein.

[0094] In one embodiment, a diagnostic oligonucleotide set comprises at least two oligonucleotide sequences listed in Table 2 or Table 3 or the Sequence Listing which are differentially expressed in leukocytes in an individual with at least one disease criterion for at least one leukocyte-implicated disease relative to the expression in individual without the at least one disease criterion, wherein expression of the two or more nucleotide sequences is correlated with at least one disease criterion, as described below.

[0095] In another embodiment, a diagnostic nucleotide set comprises at least one oligonucleotide having an oligonucleotide sequence listed in Table 2 or 3 or the Sequence Listing which is differentially expressed, and further wherein the differential expression/correlation has not previously been described. In some embodiments, the diagnostic nucleotide set is immobilized on an array.

[0096] The invention also provides diagnostic probe sets. It is understood that a probe includes any reagent capable of specifically identifying a nucleotide sequence of the diagnostic nucleotide set, including but not limited to a DNA, a RNA, cDNA, synthetic oligonucleotide, partial or full-length nucleic acid sequences. In addition, the probe may identify the protein product of a diagnostic nucleotide sequence, including, for example, antibodies and other affinity reagents. It is also understood that each probe can correspond to one gene, or multiple probes can correspond to one gene, or both, or one probe can correspond to more than one gene.

[0097] Homologs and variants of the disclosed nucleic acid molecules may be used in the present invention. Homologs and variants of these nucleic acid molecules will possess a relatively high degree of sequence identity when aligned using standard methods. The sequences encompassed by the invention have at least 40-50, 50-60, 70-80, 80-85, 85-90, 90-95 or 95-100% sequence identity to the sequences disclosed herein.

[0098] It is understood that for expression profiling, variations in the disclosed sequences will still permit detection of gene expression. The degree of sequence identity required to detect gene expression varies depending on the length of the oligomer. For a 60 mer, 6-8 random mutations or 6-8 random deletions in a 60 mer do not affect gene expression detection. Hughes, T R, et al. “Expression profiling using microarrays fabricated by an ink-jet oligonucleotide synthesizer. Nature Biotechnology, 19:343-347(2001). As the length of the DNA sequence is increased, the number of mutations or deletions permitted while still allowing gene expression detection is increased.

[0099] As will be appreciated by those skilled in the art, the sequences of the present invention may contain sequencing errors. That is, there may be incorrect nucleotides, frameshifts, unknown nucleotides, or other types of sequencing errors in any of the sequences; however, the correct sequences will fall within the homology and stringency definitions herein.

[0100] The minimum length of an oligonucleotide probe necessary for specific hybridization in the human genome can be estimated using two approaches. The first method uses a statistical argument that the probe will be unique in the human genome by chance. Briefly, the number of independent perfect matches (Po) expected for an oligonucleotide of length L in a genome of complexity C can be calculated from the equation (Laird CD, Chromosoma 32:378 (1971):
Po=(¼)^{L}*2 C

[0101] In the case of mammalian genomes, 2 C=3.6×10⁹, and an oligonucleotide of 14-15 nucleotides is expected to be represented only once in the genome. However, the distribution of nucleotides in the coding sequence of mammalian genomes is nonrandom (Lathe, R. J. Mol. Biol. 183:1 (1985) and longer oligonucleotides may be preferred in order to in increase the specificity of hybridization. In practical terms, this works out to probes that are 19-40 nucleotides long (Sambrook J et al., infra). The second method for estimating the length of a specific probe is to use a probe long enough to hybridize under the chosen conditions and use a computer to search for that sequence or close matches to the sequence in the human genome and choose a unique match. Probe sequences are chosen based on the desired hybridization properties as described in Chapter 11 of Sambrook et al, infra. The PRIMER3 program is useful for designing these probes (S. Rozen and H. Skaletsky 1996, 1997; Primer3 code available at http://www-genome.wi.mit.edu/genome_software/other/primer3.html). The sequences of these probes are then compared pair wise against a database of the human genome sequences using a program such as BLAST or MEGABLAST (Madden, T. L et al. (1996) Meth. Enzymol. 266:131-141). Since most of the human genome is now contained in the database, the number of matches will be determined. Probe sequences are chosen that are unique to the desired target sequence.

[0102] In some embodiments, a diagnostic probe set is immobilized on an array. The array is optionally comprises one or more of: a chip array, a plate array, a bead array, a pin array, a membrane array, a solid surface array, a liquid array, an oligonucleotide array, a polynucleotide array or a cDNA array, a microtiter plate, a pin array, a bead array, a membrane or a chip.

[0103] In some embodiments, the leukocyte-implicated disease is selected from the diseases listed in Table 1. In other embodiments, the disease is atherosclerosis or cardiac allograft rejection. In other embodiments, the disease is congestive heart failure, angina, myocardial infarction, systemic lupus erythematosis (SLE) and rheumatoid arthritis.

[0104] General Molecular Biology References

[0105] In the context of the invention, nucleic acids and/or proteins are manipulated according to well known molecular biology techniques. Detailed protocols for numerous such procedures are described in, e.g., in Ausubel et al. Current Protocols in Molecular Biology (supplemented through 2000) John Wiley & Sons, New York (“Ausubel”); Sambrook et al. Molecular Cloning—A Laboratory Manual (2nd Ed.), Vol. 1-3, Cold Spring Harbor Laboratory, Cold Spring Harbor, N.Y., 1989 (“Sambrook”), and Berger and Kimmel Guide to Molecular Cloning Techniques, Methods in Enzymology volume 152 Academic Press, Inc., San Diego, Calif. (“Berger”).

[0106] In addition to the above references, protocols for in vitro amplification techniques, such as the polymerase chain reaction (PCR), the ligase chain reaction (LCR), Q-replicase amplification, and other RNA polymerase mediated techniques (e.g., NASBA), useful e.g., for amplifying cDNA probes of the invention, are found in Mullis et al. (1987) U.S. Pat. No. 4,683,202; PCR Protocols A Guide to Methods and Applications (Innis et al. eds) Academic Press Inc. San Diego, Calif. (1990) (“Innis”); Arnheim and Levinson (1990) C&EN 36; The Journal Of NIH Research (1991) 3:81; Kwoh et al. (1989) Proc Natl Acad Sci USA 86, 1173; Guatelli et al. (1990) Proc Natl Acad Sci USA 87:1874; Lomell et al. (1989) J Clin Chem 35:1826; Landegren et al. (1988) Science 241:1077; Van Brunt (1990) Biotechnology 8:291; Wu and Wallace (1989) Gene 4: 560; Barringer et al. (1990) Gene 89:117, and Sooknanan and Malek (1995) Biotechnology 13:563. Additional methods, useful for cloning nucleic acids in the context of the present invention, include Wallace et al. U.S. Pat. No. 5,426,039. Improved methods of amplifying large nucleic acids by PCR are summarized in Cheng et al. (1994) Nature 369:684 and the references therein.

[0107] Certain polynucleotides of the invention, e.g., oligonucleotides can be synthesized utilizing various solid-phase strategies involving mononucleotide- and/or trinucleotide-based phosphoramidite coupling chemistry. For example, nucleic acid sequences can be synthesized by the sequential addition of activated monomers and/or trimers to an elongating polynucleotide chain. See e.g., Caruthers, M. H. et al. (1992) Meth Enzymol 211:3.

[0108] In lieu of synthesizing the desired sequences, essentially any nucleic acid can be custom ordered from any of a variety of commercial sources, such as The Midland Certified Reagent Company (mcrc@oligos.com), The Great American Gene Company (www.genco.com), ExpressGen, Inc. (www.expressgen.com), Operon Technologies, Inc. (www.operon.com), and many others.

[0109] Similarly, commercial sources for nucleic acid and protein microarrays are available, and include, e.g., Agilent Technologies, Palo Alto, Calif. (http://www.agilent.com/) Affymetrix, Santa Clara, Calif. (http://www.affymetrix.com/); and Incyte, Palo Alto, Calif. (http://www.incyte.com/) and others.

[0110] Identification of Diagnostic Nucleotide Sets

[0111] Candidate Library

[0112] Libraries of candidates that are differentially expressed in leukocytes are substrates for the identification and evaluation of diagnostic oligonucleotide sets and disease specific target nucleotide sequences.

[0113] The term leukocyte is used generically to refer to any nucleated blood cell that is not a nucleated erythrocyte. More specifically, leukocytes can be subdivided into two broad classes. The first class includes granulocytes, including, most prevalently, neutrophils, as well as eosinophils and basophils at low frequency. The second class, the non-granular or mononuclear leukocytes, includes monocytes and lymphocytes (e.g., T cells and B cells). There is an extensive literature in the art implicating leukocytes, e.g., neutrophils, monocytes and lymphocytes in a wide variety of disease processes, including inflammatory and rheumatic diseases, neurodegenerative diseases (such as Alzheimer's dementia), cardiovascular disease, endocrine diseases, transplant rejection, malignancy and infectious diseases, and other diseases listed in Table 1. Mononuclear cells are involved in the chronic immune response, while granulocytes, which make up approximately 60% of the leukocytes, have a non-specific and stereotyped response to acute inflammatory stimuli and often have a life span of only 24 hours.

[0114] In addition to their widespread involvement and/or implication in numerous disease related processes, leukocytes are particularly attractive substrates for clinical and experimental evaluation for a variety of reasons. Most importantly, they are readily accessible at low cost from essentially every potential subject. Collection is minimally invasive and associated with little pain, disability or recovery time. Collection can be performed by minimally trained personnel (e.g., phlebotomists, medical technicians, etc.) in a variety of clinical and non-clinical settings without significant technological expenditure. Additionally, leukocytes are renewable, and thus available at multiple time points for a single subject.

[0115] Assembly of Candidate Libraries

[0116] At least two conceptually distinct approaches to the assembly of candidate libraries exist. Either, or both, or other, approaches can be favorably employed. The method of assembling, or identifying, candidate libraries is secondary to the criteria utilized for selecting appropriate library members. Most importantly, library members are assembled based on differential expression of RNA or protein products in leukocyte populations. More specifically, candidate nucleotide sequences are induced or suppressed, or expressed at increased or decreased levels in leukocytes from a subject with one or more disease or disease state (a disease criterion) relative to leukocytes from a subject lacking the specified disease criterion. Alternatively, or in addition, library members can be assembled from among nucleotide sequences that are differentially expressed in activated or resting leukocytes relative to other cell types.

[0117] Firstly, publication and sequence databases can be “mined” using a variety of search strategies, including, e.g., a variety of genomics and proteomics approaches. For example, currently available scientific and medical publication databases such as Medline, Current Contents, OMIM (online Mendelian inheritance in man) various Biological and Chemical Abstracts, Journal indexes, and the like can be searched using term or key-word searches, or by author, title, or other relevant search parameters. Many such databases are publicly available, and one of skill is well versed in strategies and procedures for identifying publications and their contents, e.g., genes, other nucleotide sequences, descriptions, indications, expression pattern, etc. Numerous databases are available through the internet for free or by subscription, see, e.g., http://www.ncbi.nlm.nih.gov/PubMed/; http://www3.infotrieve.com/; http://www.isinet.com/; http://www.sciencemag.org/. Additional or alternative publication or citation databases are also available that provide identical or similar types of information, any of which are favorable employed in the context of the invention. These databases can be searched for publications describing differential gene expression in leukocytes between patient with and without diseases or conditions listed in Table 1. We identified the nucleotide sequences listed in Table 2 and some of the sequences listed in Table 8 (Example 20), using data mining methods.

[0118] Alternatively, a variety of publicly available and proprietary sequence databases (including GenBank, dbEST, UniGene, and TIGR and SAGE databases) including sequences corresponding to expressed nucleotide sequences, such as expressed sequence tags (ESTs) are available. For example, Genbank™ (http://www.ncbi.nlm.nih.gov/Genbank/) among others can be readily accessed and searched via the internet. These and other sequence and clone database resources are currently available; however, any number of additional or alternative databases comprising nucleotide sequence sequences, EST sequences, clone repositories, PCR primer sequences, and the like corresponding to individual nucleotide sequence sequences are also suitable for the purposes of the invention. Sequences from nucleotide sequences can be identified that are only found in libraries derived from leukocytes or sub-populations of leukocytes, for example see Table 2.

[0119] Alternatively, the representation, or relative frequency, of a nucleotide sequence may be determined in a leukocyte-derived nucleic acid library and compared to the representation of the sequence in non-leukocyte derived libraries. The representation of a nucleotide sequence correlates with the relative expression level of the nucleotide sequence in leukocytes and non-leukocytes. An oligonucleotide sequence which has increased or decreased representation in a leukocyte-derived nucleic acid library relative to a non-leukocyte-derived libraries is a candidate for a leukocyte-specific gene.

[0120] Nucleotide sequences identified as having specificity to activated or resting leukocytes or to leukocytes from patients or patient samples with a variety of disease types can be isolated for use in a candidate library for leukocyte expression profiling through a variety of mechanisms. These include, but are not limited to, the amplification of the nucleotide sequence from RNA or DNA using nucleotide sequence specific primers for PCR or RT-PCR, isolation of the nucleotide sequence using conventional cloning methods, the purchase of an IMAGE consortium cDNA clone (EST) with complimentary sequence or from the same expressed nucleotide sequence, design of oligonucleotides, preparation of synthetic nucleic acid sequence, or any other nucleic-acid based method. In addition, the protein product of the nucleotide sequence can be isolated or prepared, and represented in a candidate library, using standard methods in the art, as described further below.

[0121] While the above discussion related primarily to “genomics” approaches, it is appreciated that numerous, analogous “proteomics” approaches are suitable to the present invention. For example, a differentially expressed protein product can, for example, be detected using western analysis, two-dimensional gel analysis, chromatographic separation, mass spectrometric detection, protein-fusion reporter constructs, colorometric assays, binding to a protein array, or by characterization of polysomal mRNA. The protein is further characterized and the nucleotide sequence encoding the protein is identified using standard techniques, e.g. by screening a cDNA library using a probe based on protein sequence information.

[0122] The second approach involves the construction of a differential expression library by any of a variety of means. Any one or more of differential screening, differential display or subtractive hybridization procedures, or other techniques that preferentially identify, isolate or amplify differentially expressed nucleotide sequences can be employed to produce a library of differentially expressed candidate nucleotide sequences, a subset of such a library, a partial library, or the like. Such methods are well known in the art. For example, peripheral blood leukocytes, (i.e., a mixed population including lymphocytes, monocytes and neutrophils), from multiple donor samples are pooled to prevent bias due to a single-donor's unique genotype. The pooled leukocytes are cultured in standard medium and stimulated with individual cytokines or growth factors e.g., with IL-2, IL-1, MCP1, TNFα, and/or IL8 according to well known procedures (see, e.g., Tough et al. (1999); Winston et al. (1999); Hansson et al. (1989)). Typically, leukocytes are recovered from Buffy coat preparations produced by centrifugation of whole blood. Alternatively, mononuclear cells (monocytes and lymphocytes) can be obtained by density gradient centrifugation of whole blood, or specific cell types (such as a T lymphocyte) can be isolated using affinity reagents to cell specific surface markers. Leukocytes may also be stimulated by incubation with ionomycin, and phorbol myristate acetate (PMA). This stimulation protocol is intended to non-specifically mimic “activation” of numerous pathways due to variety of disease conditions rather than to simulate any single disease condition or paradigm.

[0123] Using well known subtractive hybridization procedures (as described in, e.g., U.S. Pat. Nos. 5,958,738; 5589,339; 5,827,658; 5,712,127; 5,643,761) each of which are hereby incorporated by reference, a library is produced that is enriched for RNA species (messages) that are differentially expressed between test and control leukocyte populations. In some embodiments, the test population of leukocytes are simply stimulated as described above to emulate non-specific activation events, while in other embodiments the test population can be selected from subjects (or patients) with a specified disease or class of diseases. Typically, the control leukocyte population lacks the defining test condition, e.g., stimulation, disease state, diagnosis, genotype, etc. Alternatively, the total RNA from control and test leukocyte populations are prepared by established techniques, treated with DNAseI, and selected for messenger RNA with an intact 3′ end (i.e., polyA(+) messenger RNA) e.g., using commercially available kits according to the manufacturer's instructions e.g. Clontech. Double stranded cDNA is synthesized utilizing reverse transcriptase. Double stranded cDNA is then cut with a first restriction enzyme (e.g., NlaIII, that cuts at the recognition site: CATG, and cuts the cDNA sequence at approximately 256 bp intervals) that cuts the cDNA molecules into conveniently sized fragments.

[0124] The cDNAs prepared from the test population of leukocytes are divided into (typically 2) “tester” pools, while cDNAs prepared from the control population of leukocytes are designated the “driver” pool. Typically, pooled populations of cells from multiple individual donors are utilized and in the case of stimulated versus unstimulated cells, the corresponding tester and driver pools for any single subtraction reaction are derived from the same donor pool.

[0125] A unique double-stranded adapter is ligated to each of the tester cDNA populations using unphosphorylated primers so that only the sense strand is covalently linked to the adapter. An initial hybridization is performed consisting of each of the tester pools of cDNA (each with its corresponding adapter) and an excess of the driver cDNA. Typically, an excess of about 10-100 fold driver relative to tester is employed, although significantly lower or higher ratios can be empirically determined to provide more favorable results. The initial hybridization results in an initial normalization of the cDNAs such that high and low abundance messages become more equally represented following hybridization due to a failure of driver/tester hybrids to amplify.

[0126] A second hybridization involves pooling un-hybridized sequences from initial hybridizations together with the addition of supplemental driver cDNA. In this step, the expressed sequences enriched in the two tester pools following the initial hybridization can hybridize. Hybrids resulting from the hybridization between members of each of the two tester pools are then recovered by amplification in a polymerase chain reaction (PCR) using primers specific for the unique adapters. Again, sequences originating in a tester pool that form hybrids with components of the driver pool are not amplified. Hybrids resulting between members of the same tester pool are eliminated by the formation of “panhandles” between their common 5′ and 3′ ends. For additional details, see, e.g., Lukyanov et al. (1997) Biochem Biophys Res Commun 230:285-8.

[0127] Typically, the tester and driver pools are designated in the alternative, such that the hybridization is performed in both directions to ensure recovery of messenger RNAs that are differentially expressed in either a positive or negative manner (i.e., that are turned on or turned off, up-regulated or down-regulated). Accordingly, it will be understood that the designation of test and control populations is to some extent arbitrary, and that a test population can just as easily be compared to leukocytes derived from a patient with the same of another disease of interest.

[0128] If so desired, the efficacy of the process can be assessed by such techniques as semi-quantitative PCR of known (i.e., control) nucleotide sequences, of varying abundance such as β-actin. The resulting PCR products representing partial cDNAs of differentially expressed nucleotide sequences are then cloned (i.e., ligated) into an appropriate vector (e.g., a commercially available TA cloning vector, such as pGEM from Promega) and, optionally, transformed into competent bacteria for selection and screening.

[0129] Either of the above approaches, or both in combination, or indeed, any procedure, which permits the assembly of a collection of nucleotide sequences that are expressed in leukocytes, is favorably employed to produce the libraries of candidates useful for the identification of diagnostic nucleotide sets and disease specific target nucleotides of the invention. Additionally, any method that permits the assembly of a collection of nucleotides that are expressed in leukocytes and preferentially associated with one or more disease or condition, whether or not the nucleotide sequences are differentially expressed, is favorably employed in the context of the invention. Typically, libraries of about 2,000 members are produced (although libraries in excess of 110,000 are not uncommon). Following additional evaluation procedures, as described below, the proportion of unique clones in the candidate library can approximate 100%.

[0130] A candidate oligonucleotide sequence may be represented in a candidate library by a full-length or partial nucleic acid sequence, deoxyribonucleic acid (DNA) sequence, cDNA sequence, RNA sequence, synthetic oligonucleotides, etc. The nucleic acid sequence can be at least 19 nucleotides in length, at least 25 nucleotides, at least 40 nucleotides, at least 100 nucleotides, or larger. Alternatively, the protein product of a candidate nucleotide sequence may be represented in a candidate library using standard methods, as further described below.

[0131] Characterization of Candidate Oligonucleotide Sequences

[0132] The sequence of individual members (e.g., clones, partial sequence listing in a database such as an EST, etc.) of the candidate oligonucleotide libraries is then determined by conventional sequencing methods well known in the art, e.g., by the dideoxy-chain termination method of Sanger et al. (1977) Proc Natl Acad Sci USA 74:5463-7; by chemical procedures, e.g., Maxam and Gilbert (1977) Proc Natl Acad Sci USA 74:560-4; or by polymerase chain reaction cycle sequencing methods, e.g., Olsen and Eckstein (1989) Nuc Acid Res 17:9613-20, DNA chip based sequencing techniques or variations, including automated variations (e.g., as described in Hunkapiller et al. (1991) Science 254:59-67; Pease et al. (1994) Proc Natl Acad Sci USA 91:5022-6), thereof. Numerous kits for performing the above procedures are commercially available and well known to those of skill in the art. Character strings corresponding to the resulting nucleotide sequences are then recorded (i.e., stored) in a database. Most commonly the character strings are recorded on a computer readable medium for processing by a computational device.

[0133] Generally, to facilitate subsequent analysis, a custom algorithm is employed to query existing databases in an ongoing fashion, to determine the identity, expression pattern and potential function of the particular members of a candidate library. The sequence is first processed, by removing low quality sequence. Next the vector sequences are identified and removed and sequence repeats are identified and masked. The remaining sequence is then used in a Blast algorithm against multiple publicly available, and/or proprietary databases, e.g., NCBI nucleotide, EST and protein databases, Unigene, and Human Genome Sequence. Sequences are also compared to all previously sequenced members of the candidate libraries to detect redundancy.

[0134] In some cases, sequences are of high quality, but do not match any sequence in the NCBI nr, human EST or Unigene databases. In this case the sequence is queried against the human genomic sequence. If a single chromosomal site is matched with a high degree of confidence, that region of genomic DNA is identified and subjected to further analysis with a gene prediction program such as GRAIL. This analysis may lead to the identification of a new gene in the genomic sequence. This sequence can then be translated to identify the protein sequence that is encoded and that sequence can be further analyzed using tools such as Pfam, Blast P, or other protein structure prediction programs, as illustrated in Table 7. Typically, the above analysis is directed towards the identification of putative coding regions, e.g., previously unidentified open reading frames, confirming the presence of known coding sequences, and determining structural motifs or sequence similarities of the predicted protein (i.e., the conceptual translation product) in relation to known sequences. In addition, it has become increasingly possible to assemble “virtual cDNAs” containing large portions of coding region, simply through the assembly of available expressed sequence tags (ESTs). In turn, these extended nucleic acid and amino acid sequences allow the rapid expansion of substrate sequences for homology searches and structural and functional motif characterization. The results of these analysis permits the categorization of sequences according to structural characteristics, e.g., as structural proteins, proteins involved in signal transduction, cell surface or secreted proteins etc.

[0135] It is understood that full-length nucleotide sequences may also be identified using conventional methods, for example, library screening, RT-PCR, chromosome walking, etc., as described in Sambrook and Ausubel, infra.

[0136] Candidate Nucleotide Library of the Invention

[0137] We identified members of a candidate nucleotide library that are differentially expressed in activated leukocytes and resting leukocytes. Accordingly, the invention provides the candidate leukocyte nucleotide library comprising the nucleotide sequences listed in Table 2, Table 3 and in the sequence listing. In another embodiment, the invention provides a candidate library comprising at least two nucleotide sequences listed in Table 2, Table 3, and the sequence listing. In another embodiment, the at least two nucleotide sequence are at least 19 nucleotides in length, at least 35 nucleotides, at least 40 nucleotides or at least 100 nucleotides. In some embodiments, the nucleotide sequences comprises deoxyribonucleic acid (DNA) sequence, ribonucleic acid (RNA) sequence, synthetic oligonucleotide sequence, or genomic DNA sequence. It is understood that the nucleotide sequences may each correspond to one gene, or that several nucleotide sequences may correspond to one gene, or both.

[0138] The invention also provides probes to the candidate nucleotide library. In one embodiment of the invention, the probes comprise at least two nucleotide sequences listed in Table 2, Table 3, or the sequence listing which are differentially expressed in leukocytes in an individual with a least one disease criterion for at least one leukocyte-related disease and in leukocytes in an individual without the at least one disease criterion, wherein expression of the two or more nucleotide sequences is correlated with at least one disease criterion. It is understood that a probe may detect either the RNA expression or protein product expression of the candidate nucleotide library. Alternatively, or in addition, a probe can detect a genotype associated with a candidate nucleotide sequence, as further described below. In another embodiment, the probes for the candidate nucleotide library are immobilized on an array.

[0139] The candidate nucleotide library of the invention is useful in identifying diagnostic nucleotide sets of the invention, as described below. The candidate nucleotide sequences may be further characterized, and may be identified as a disease target nucleotide sequence and/or a novel nucleotide sequence, as described below. The candidate nucleotide sequences may also be suitable for use as imaging reagents, as described below.

[0140] Generation of Expression Patterns

[0141] RNA, DNA or Protein Sample Procurement

[0142] Following identification or assembly of a library of differentially expressed candidate nucleotide sequences, leukocyte expression profiles corresponding to multiple members of the candidate library are obtained. Leukocyte samples from one or more subjects are obtained by standard methods. Most typically, these methods involve trans-cutaneous venous sampling of peripheral blood. While sampling of circulating leukocytes from whole blood from the peripheral vasculature is generally the simplest, least invasive, and lowest cost alternative, it will be appreciated that numerous alternative sampling procedures exist, and are favorably employed in some circumstances. No pertinent distinction exists, in fact, between leukocytes sampled from the peripheral vasculature, and those obtained, e.g., from a central line, from a central artery, or indeed from a cardiac catheter, or during a surgical procedure which accesses the central vasculature. In addition, other body fluids and tissues that are, at least in part, composed of leukocytes are also desirable leukocyte samples. For example, fluid samples obtained from the lung during bronchoscopy may be rich in leukocytes, and amenable to expression profiling in the context of the invention, e.g., for the diagnosis, prognosis, or monitoring of lung transplant rejection, inflammatory lung diseases or infectious lung disease. Fluid samples from other tissues, e.g., obtained by endoscopy of the colon, sinuses, esophagus, stomach, small bowel, pancreatic duct, biliary tree, bladder, ureter, vagina, cervix or uterus, etc., are also suitable. Samples may also be obtained other sources containing leukocytes, e.g., from urine, bile, cerebrospinal fluid, feces, gastric or intestinal secretions, semen, or solid organ or joint biopsies.

[0143] Most frequently, mixed populations of leukocytes, such as are found in whole blood are utilized in the methods of the present invention. A crude separation, e.g., of mixed leukocytes from red blood cells, and/or concentration, e.g., over a sucrose, percoll or ficoll gradient, or by other methods known in the art, can be employed to facilitate the recovery of RNA or protein expression products at sufficient concentrations, and to reduce non-specific background. In some instances, it can be desirable to purify sub-populations of leukocytes, and methods for doing so, such as density or affinity gradients, flow cytometry, fluorescence Activated Cell Sorting (FACS), immuno-magnetic separation, “panning,” and the like, are described in the available literature and below.

[0144] Obtaining DNA, RNA and Protein Samples for Expression Profiling

[0145] Expression patterns can be evaluated at the level of DNA, or RNA or protein products. For example, a variety of techniques are available for the isolation of RNA from whole blood. Any technique that allows isolation of mRNA from cells (in the presence or absence of rRNA and tRNA) can be utilized. In brief, one method that allows reliable isolation of total RNA suitable for subsequent gene expression analysis, is described as follows. Peripheral blood (either venous or arterial) is drawn from a subject, into one or more sterile, endotoxin free, tubes containing an anticoagulant (e.g., EDTA, citrate, heparin, etc.). Typically, the sample is divided into at least two portions. One portion, e.g., of 5-8 ml of whole blood is frozen and stored for future analysis, e.g., of DNA or protein. A second portion, e.g., of approximately 8 ml whole blood is processed for isolation of total RNA by any of a variety of techniques as described in, e.g, Sambook, Ausubel, below, as well as U.S. Pat. Nos. 5,728,822 and 4,843,155.

[0146] Typically, a subject sample of mononuclear leukocytes obtained from about 8 ml of whole blood, a quantity readily available from an adult human subject under most circumstances, yields 5-20 μg of total RNA. This amount is ample, e.g., for labeling and hybridization to at least two probe arrays. Labeled probes for analysis of expression patterns of nucleotides of the candidate libraries are prepared from the subject's sample of RNA using standard methods. In many cases, cDNA is synthesized from total RNA using a polyT primer and labeled, e.g., radioactive or fluorescent, nucleotides. The resulting labeled cDNA is then hybridized to probes corresponding to members of the candidate nucleotide library, and expression data is obtained for each nucleotide sequence in the library. RNA isolated from subject samples (e.g., peripheral blood leukocytes, or leukocytes obtained from other biological fluids and samples) is next used for analysis of expression patterns of nucleotides of the candidate libraries.

[0147] In some cases, however, the amount of RNA that is extracted from the leukocyte sample is limiting, and amplification of the RNA is desirable. Amplification may be accomplished by increasing the efficiency of probe labeling, or by amplifying the RNA sample prior to labeling. It is appreciated that care must be taken to select an amplification procedure that does not introduce any bias (with respect to gene expression levels) during the amplification process.

[0148] Several methods are available that increase the signal from limiting amounts of RNA, e.g. use of the Clontech (Glass Fluorescent Labeling Kit) or Stratagene (Fairplay Microarray Labeling Kit), or the Micromax kit (New England Nuclear, Inc.). Alternatively, cDNA is synthesized from RNA using a T7-polyT primer, in the absence of label, and DNA dendrimers from Genisphere (3DNA Submicro) are hybridized to the poly T sequence on the primer, or to a different “capture sequence” which is complementary to a fluorescently labeled sequence. Each 3DNA molecule has 250 fluorescent molecules and therefore can strongly label each cDNA.

[0149] Alternatively, the RNA sample is amplified prior to labeling. For example, linear amplification may be performed, as described in U.S. Pat. No. 6,132,997. A T7-polyT primer is used to generate the cDNA copy of the RNA. A second DNA strand is then made to complete the substrate for amplification. The T7 promoter incorporated into the primer is used by a T7 polymerase to produce numerous antisense copies of the original RNA. Fluorescent dye labeled nucleotides are directly incorporated into the RNA. Alternatively, amino allyl labeled nucleotides are incorporated into the RNA, and then fluorescent dyes are chemically coupled to the amino allyl groups, as described in Hughes. Other exemplary methods for amplification are described below.

[0150] It is appreciated that the RNA isolated must contain RNA derived from leukocytes, but may also contain RNA from other cell types to a variable degree. Additionally, the isolated RNA may come from subsets of leukocytes, e.g. monocytes and/or T-lymphocytes, as described above. Such consideration of cell type used for the derivation of RNA depend on the method of expression profiling used.

[0151] DNA samples may be obtained for analysis of the presence of DNA mutations, single nucleotide polymorphisms (SNPs), or other polymorphisms. DNA is isolated using standard techniques, e.g. Maniatus, supra.

[0152] Expression of products of candidate nucleotides may also be assessed using proteomics. Protein(s) are detected in samples of patient serum or from leukocyte cellular protein. Serum is prepared by centrifugation of whole blood, using standard methods. Proteins present in the serum may have been produced from any of a variety of leukocytes and non-leukocyte cells, and include secreted proteins from leukocytes. Alternatively, leukocytes or a desired sub-population of leukocytes are prepared as described above. Cellular protein is prepared from leukocyte samples using methods well known in the art, e.g., Trizol (Invitrogen Life Technologies, cat # 15596108; Chomczynski, P. and Sacchi, N. (1987) Anal. Biochem. 162, 156; Simms, D., Cizdziel, P. E., and Chomczynski, P. (1993) Focus® 15, 99; Chomczynski, P., Bowers-Finn, R., and Sabatini, L. (1987) J. of NIH Res. 6, 83; Chomczynski, P. (1993) Bio/Techniques 15, 532; Bracete, A. M., Fox, D. K., and Simms, D. (1998) Focus 20, 82; Sewall, A. and McRae, S. (1998) Focus 20, 36; Anal Biochem 1984 April; 138(1):141-3, A method for the quantitative recovery of protein in dilute solution in the presence of detergents and lipids; Wessel D, Flugge U I. (1984) Anal Biochem. 1984 April; 138(1):141-143.

[0153] Obtaining Expression Patterns

[0154] Expression patterns, or profiles, of a plurality of nucleotides corresponding to members of the candidate library are then evaluated in one or more samples of leukocytes. Typically, the leukocytes are derived from patient peripheral blood samples, although, as indicated above, many other sample sources are also suitable. These expression patterns constitute a set of relative or absolute expression values for a some number of RNAs or protein products corresponding to the plurality of nucleotide sequences evaluated, which is referred to herein as the subject's “expression profile” for those nucleotide sequences. While expression patterns for as few as one independent member of the candidate library can be obtained, it is generally preferable to obtain expression patterns corresponding to a larger number of nucleotide sequences, e.g., about 2, about 5, about 10, about 20, about 50, about 100, about 200, about 500, or about 1000, or more. The expression pattern for each differentially expressed component member of the library provides a finite specificity and sensitivity with respect to predictive value, e.g., for diagnosis, prognosis, monitoring, and the like.

[0155] Clinical Studies, Data and Patient Groups

[0156] For the purpose of discussion, the term subject, or subject sample of leukocytes, refers to an individual regardless of health and/or disease status. A subject can be a patient, a study participant, a control subject, a screening subject, or any other class of individual from whom a leukocyte sample is obtained and assessed in the context of the invention. Accordingly, a subject can be diagnosed with a disease, can present with one or more symptom of a disease, or a predisposing factor, such as a family (genetic) or medical history (medical) factor, for a disease, or the like. Alternatively, a subject can be healthy with respect to any of the aforementioned factors or criteria. It will be appreciated that the term “healthy” as used herein, is relative to a specified disease, or disease factor, or disease criterion, as the term “healthy” cannot be defined to correspond to any absolute evaluation or status. Thus, an individual defined as healthy with reference to any specified disease or disease criterion, can in fact be diagnosed with any other one or more disease, or exhibit any other one or more disease criterion.

[0157] Furthermore, while the discussion of the invention focuses, and is exemplified using human sequences and samples, the invention is equally applicable, through construction or selection of appropriate candidate libraries, to non-human animals, such as laboratory animals, e.g., mice, rats, guinea pigs, rabbits; domesticated livestock, e.g., cows, horses, goats, sheep, chicken, etc.; and companion animals, e.g., dogs, cats, etc.

[0158] Methods for Obtaining Expression Data

[0159] Numerous methods for obtaining expression data are known, and any one or more of these techniques, singly or in combination, are suitable for determining expression profiles in the context of the present invention. For example, expression patterns can be evaluated by northern analysis, PCR, RT-PCR, Taq Man analysis, FRET detection, monitoring one or more molecular beacon, hybridization to an oligonucleotide array, hybridization to a cDNA array, hybridization to a polynucleotide array, hybridization to a liquid microarray, hybridization to a microelectric array, molecular beacons, cDNA sequencing, clone hybridization, cDNA fragment fingerprinting, serial analysis of gene expression (SAGE), subtractive hybridization, differential display and/or differential screening (see, e.g., Lockhart and Winzeler (2000) Nature 405:827-836, and references cited therein).

[0160] For example, specific PCR primers are designed to a member(s) of a candidate nucleotide library. cDNA is prepared from subject sample RNA by reverse transcription from a poly-dT oligonucleotide primer, and subjected to PCR. Double stranded cDNA may be prepared using primers suitable for reverse transcription of the PCR product, followed by amplification of the cDNA using in vitro transcription. The product of in vitro transcription is a sense-RNA corresponding to the original member(s) of the candidate library. PCR product may be also be evaluated in a number of ways known in the art, including real-time assessment using detection of labeled primers, e.g. TaqMan or molecular beacon probes. Technology platforms suitable for analysis of PCR products include the ABI 7700, 5700, or 7000 Sequence Detection Systems (Applied Biosystems, Foster City, Calif.), the MJ Research Opticon (MJ Research, Waltham, Mass.), the Roche Light Cycler (Roche Diagnositics, Indianapolis, Ind.), the Stratagene MX4000 (Stratagene, La Jolla, Calif.), and the Bio-Rad iCycler (Bio-Rad Laboratories, Hercules, Calif.). Alternatively, molecular beacons are used to detect presence of a nucleic acid sequence in an unamplified RNA or cDNA sample, or following amplification of the sequence using any method, e.g. IVT (In Vitro transcription) or NASBA (nucleic acid sequence based amplification). Molecular beacons are designed with sequences complementary to member(s) of a candidate nucleotide library, and are linked to fluorescent labels. Each probe has a different fluorescent label with non-overlapping emission wavelengths. For example, expression of ten genes may be assessed using ten different sequence-specific molecular beacons.

[0161] Alternatively, or in addition, molecular beacons are used to assess expression of multiple nucleotide sequences at once. Molecular beacons with sequence complimentary to the members of a diagnostic nucleotide set are designed and linked to fluorescent labels. Each fluorescent label used must have a non-overlapping emission wavelength. For example, 10 nucleotide sequences can be assessed by hybridizing 10 sequence specific molecular beacons (each labeled with a different fluorescent molecule) to an amplified or un-amplified RNA or cDNA sample. Such an assay bypasses the need for sample labeling procedures.

[0162] Alternatively, or in addition bead arrays can be used to assess expression of multiple sequences at once. See, e.g, LabMAP 100, Luminex Corp, Austin, Tex.). Alternatively, or in addition electric arrays are used to assess expression of multiple sequences, as exemplified by the e-Sensor technology of Motorola (Chicago, Ill.) or Nanochip technology of Nanogen (San Diego, Calif.)

[0163] Of course, the particular method elected will be dependent on such factors as quantity of RNA recovered, practitioner preference, available reagents and equipment, detectors, and the like. Typically, however, the elected method(s) will be appropriate for processing the number of samples and probes of interest. Methods for high-throughput expression analysis are discussed below.

[0164] Alternatively, expression at the level of protein products of gene expression is performed. For example, protein expression, in a sample of leukocytes, can be evaluated by one or more method selected from among: western analysis, two-dimensional gel analysis, chromatographic separation, mass spectrometric detection, protein-fusion reporter constructs, calorimetric assays, binding to a protein array and characterization of polysomal mRNA. One particularly favorable approach involves binding of labeled protein expression products to an array of antibodies specific for members of the candidate library. Methods for producing and evaluating antibodies are widespread in the art, see, e.g., Coligan, supra; and Harlow and Lane (1989) Antibodies: A Laboratory Manual, Cold Spring Harbor Press, NY (“Harlow and Lane”). Additional details regarding a variety of immunological and immunoassay procedures adaptable to the present invention by selection of antibody reagents specific for the products of candidate nucleotide sequences can be found in, e.g., Stites and Terr (eds.)(1991) Basic and Clinical Immunology, 7^{th} ed., and Paul, supra. Another approach uses systems for performing desorption spectrometry. Commercially available systems, e.g., from Ciphergen Biosystems, Inc. (Fremont, Calif.) are particularly well suited to quantitative analysis of protein expression. Indeed, Protein Chip® arrays (see, e.g., http://www.ciphergen.com/) used in desorption spectrometry approaches provide arrays for detection of protein expression. Alternatively, affinity reagents, e.g., antibodies, small molecules, etc.) are developed that recognize epitopes of the protein product. Affinity assays are used in protein array assays, e.g. to detect the presence or absence of particular proteins. Alternatively, affinity reagents are used to detect expression using the methods described above. In the case of a protein that is expressed on the cell surface of leukocytes, labeled affinity reagents are bound to populations of leukocytes, and leukocytes expressing the protein are identified and counted using fluorescent activated cell sorting (FACS).

[0165] It is appreciated that the methods of expression evaluation discussed herein, although discussed in the context of discovery of diagnostic nucleotide sets, are equally applicable for expression evaluation when using diagnostic nucleotide sets for, e.g. diagnosis of diseases, as further discussed below.

[0166] High Throughput Expression Assays

[0167] A number of suitable high throughput formats exist for evaluating gene expression. Typically, the term high throughput refers to a format that performs at least about 100 assays, or at least about 500 assays, or at least about 1000 assays, or at least about 5000 assays, or at least about 10,000 assays, or more per day. When enumerating assays, either the number of samples or the number of candidate nucleotide sequences evaluated can be considered. For example, a northern analysis of, e.g., about 100 samples performed in a gridded array, e.g., a dot blot, using a single probe corresponding to a candidate nucleotide sequence can be considered a high throughput assay. More typically, however, such an assay is performed as a series of duplicate blots, each evaluated with a distinct probe corresponding to a different member of the candidate library. Alternatively, methods that simultaneously evaluate expression of about 100 or more candidate nucleotide sequences in one or more samples, or in multiple samples, are considered high throughput.

[0168] Numerous technological platforms for performing high throughput expression analysis are known. Generally, such methods involve a logical or physical array of either the subject samples, or the candidate library, or both. Common array formats include both liquid and solid phase arrays. For example, assays employing liquid phase arrays, e.g., for hybridization of nucleic acids, binding of antibodies or other receptors to ligand, etc., can be performed in multiwell, or microtiter, plates. Microtiter plates with 96, 384 or 1536 wells are widely available, and even higher numbers of wells, e.g, 3456 and 9600 can be used. In general, the choice of microtiter plates is determined by the methods and equipment, e.g., robotic handling and loading systems, used for sample preparation and analysis. Exemplary systems include, e.g., the ORCA™ system from Beckman-Coulter, Inc. (Fullerton, Calif.) and the Zymate systems from Zymark Corporation (Hopkinton, Mass.).

[0169] Alternatively, a variety of solid phase arrays can favorably be employed in to determine expression patterns in the context of the invention. Exemplary formats include membrane or filter arrays (e.g, nitrocellulose, nylon), pin arrays, and bead arrays (e.g., in a liquid “slurry”). Typically, probes corresponding to nucleic acid or protein reagents that specifically interact with (e.g., hybridize to or bind to) an expression product corresponding to a member of the candidate library are immobilized, for example by direct or indirect cross-linking, to the solid support. Essentially any solid support capable of withstanding the reagents and conditions necessary for performing the particular expression assay can be utilized. For example, functionalized glass, silicon, silicon dioxide, modified silicon, any of a variety of polymers, such as (poly)tetrafluoroethylene, (poly)vinylidenedifluoride, polystyrene, polycarbonate, or combinations thereof can all serve as the substrate for a solid phase array.

[0170] In a preferred embodiment, the array is a “chip” composed, e.g., of one of the above specified materials. Polynucleotide probes, e.g., RNA or DNA, such as cDNA, synthetic oligonucleotides, and the like, or binding proteins such as antibodies, that specifically interact with expression products of individual components of the candidate library are affixed to the chip in a logically ordered manner, i.e., in an array. In addition, any molecule with a specific affinity for either the sense or anti-sense sequence of the marker nucleotide sequence (depending on the design of the sample labeling), can be fixed to the array surface without loss of specific affinity for the marker and can be obtained and produced for array production, for example, proteins that specifically recognize the specific nucleic acid sequence of the marker, ribozymes, peptide nucleic acids (PNA), or other chemicals or molecules with specific affinity.

[0171] Detailed discussion of methods for linking nucleic acids and proteins to a chip substrate, are found in, e.g., U.S. Pat. No. 5,143,854 “LARGE SCALE PHOTOLITHOGRAPHIC SOLID PHASE SYNTHESIS OF POLYPEPTIDES AND RECEPTOR BINDING SCREENING THEREOF” to Pirrung et al., issued, Sep. 1, 1992; U.S. Pat. No. 5,837,832 “ARRAYS OF NUCLEIC ACID PROBES ON BIOLOGICAL CHIPS” to Chee et al., issued Nov. 17, 1998; U.S. Pat. No. 6,087,112 “ARRAYS WITH MODIFIED OLIGONUCLEOTIDE AND POLYNUCLEOTIDE COMPOSITIONS” to Dale, issued Jul. 11, 2000; U.S. Pat. No. 5,215,882 “METHOD OF IMMOBILIZING NUCLEIC ACID ON A SOLID SUBSTRATE FOR USE IN NUCLEIC ACID HYBRIDIZATION ASSAYS” to Bahl et al., issued Jun. 1, 1993; U.S. Pat. No. 5,707,807 “MOLECULAR INDEXING FOR EXPRESSED GENE ANALYSIS” to Kato, issued Jan. 13, 1998; U.S. Pat. No. 5,807,522 “METHODS FOR FABRICATING MICROARRAYS OF BIOLOGICAL SAMPLES” to Brown et al., issued Sep. 15, 1998; U.S. Pat. No. 5,958,342 “JET DROPLET DEVICE” to Gamble et al., issued Sep. 28, 1999; U.S. Pat. No. 5,994,076 “METHODS OF ASSAYING DIFFERENTIAL EXPRESSION” to Chenchik et al., issued Nov. 30, 1999; U.S. Pat. No. 6,004,755 “QUANTITATIVE MICROARRAY HYBRIDIZATION ASSAYS” to Wang, issued Dec. 21, 1999; U.S. Pat. No. 6,048,695 “CHEMICALLY MODIFIED NUCLEIC ACIDS AND METHOD FOR COUPLING NUCLEIC ACIDS TO SOLID SUPPORT” to Bradley et al., issued Apr. 11, 2000; U.S. Pat. No. 6,060,240 “METHODS FOR MEASURING RELATIVE AMOUNTS OF NUCLEIC ACIDS IN A COMPLEX MIXTURE AND RETRIEVAL OF SPECIFIC SEQUENCES THEREFROM” to Kamb et al., issued May 9, 2000; U.S. Pat. No. 6,090,556 “METHOD FOR QUANTITATIVELY DETERMINING THE EXPRESSION OF A GENE” to Kato, issued Jul. 18, 2000; and U.S. Pat. No. 6,040,138 “EXPRESSION MONITORING BY HYBRIDIZATION TO HIGH DENSITY OLIGONUCLEOTIDE ARRAYS” to Lockhart et al., issued Mar. 21, 2000 each of which are hereby incorporated by reference in their entirety.

[0172] For example, cDNA inserts corresponding to candidate nucleotide sequences, in a standard TA cloning vector are amplified by a polymerase chain reaction for approximately 30-40 cycles. The amplified PCR products are then arrayed onto a glass support by any of a variety of well known techniques, e.g., the VSLIPS™ technology described in U.S. Pat. No. 5,143,854. RNA, or cDNA corresponding to RNA, isolated from a subject sample of leukocytes is labeled, e.g., with a fluorescent tag, and a solution containing the RNA (or cDNA) is incubated under conditions favorable for hybridization, with the “probe” chip. Following incubation, and washing to eliminate non-specific hybridization, the labeled nucleic acid bound to the chip is detected qualitatively or quantitatively, and the resulting expression profile for the corresponding candidate nucleotide sequences is recorded. It is appreciated that the probe used for diagnostic purposes may be identical to the probe used during diagnostic nucleotide sequence discovery and validation. Alternatively, the probe sequence may be different than the sequence used in diagnostic nucleotide sequence discovery and validation. Multiple cDNAs from a nucleotide sequence that are non-overlapping or partially overlapping may also be used.

[0173] In another approach, oligonucleotides corresponding to members of a candidate nucleotide library are synthesized and spotted onto an array. Alternatively, oligonucleotides are synthesized onto the array using methods known in the art, e.g. Hughes, et al. supra. The oligonucleotide is designed to be complementary to any portion of the candidate nucleotide sequence. In addition, in the context of expression analysis for, e.g. diagnostic use of diagnostic nucleotide sets, an oligonucleotide can be designed to exhibit particular hybridization characteristics, or to exhibit a particular specificity and/or sensitivity, as further described below.

[0174] Hybridization signal may be amplified using methods known in the art, and as described herein, for example use of the Clontech kit (Glass Fluorescent Labeling Kit), Stratagene kit (Fairplay Microarray Labeling Kit), the Micromax kit (New England Nuclear, Inc.), the Genisphere kit (3DNA Submicro), linear amplification, e.g. as described in U.S. Pat. No. 6,132,997 or described in Hughes, T R, et al., Nature Biotechnology, 19:343-347 (2001) and/or Westin et al. Nat Biotech. 18:199-204.

[0175] Alternatively, fluorescently labeled cDNA are hybridized directly to the microarray using methods known in the art. For example, labeled cDNA are generated by reverse transcription using Cy3- and Cy5-conjugated deoxynucleotides, and the reaction products purified using standard methods. It is appreciated that the methods for signal amplification of expression data useful for identifying diagnostic nucleotide sets are also useful for amplification of expression data for diagnostic purposes.

[0176] Microarray expression may be detected by scanning the microarray with a variety of laser or CCD-based scanners, and extracting features with numerous software packages, for example, Imagene (Biodiscovery), Feature Extraction (Agilent), Scanalyze (Eisen, M. 1999. SCANALYZE User Manual; Stanford Univ., Stanford, Calif. Ver 2.32.), GenePix (Axon Instruments).

[0177] In another approach, hybridization to microelectric arrays is performed, e.g. as described in Umek et al (2001) J Mol Diagn. 3:74-84. An affinity probe, e.g. DNA, is deposited on a metal surface. The metal surface underlying each probe is connected to a metal wire and electrical signal detection system. Unlabelled RNA or cDNA is hybridized to the array, or alternatively, RNA or cDNA sample is amplified before hybridization, e.g. by PCR. Specific hybridization of sample RNA or cDNA results in generation of an electrical signal, which is transmitted to a detector. See Westin (2000) Nat Biotech. 18:199-204 (describing anchored multiplex amplification of a microelectronic chip array); Edman (1997) NAR 25:4907-14; Vignali (2000) J Immunol Methods 243:243-55.

[0178] In another approach, a microfluidics chip is used for RNA sample preparation and analysis. This approach increases efficiency because sample preparation and analysis are streamlined. Briefly, microfluidics may be used to sort specific leukocyte sub-populations prior to RNA preparation and analysis. Microfluidics chips are also useful for, e.g., RNA preparation, and reactions involving RNA (reverse transcription, RT-PCR). Briefly, a small volume of whole, anti-coagulated blood is loaded onto a microfluidics chip, for example chips available from Caliper (Mountain View, Calif.) or Nanogen (San Diego, Calif.) A microfluidics chip may contain channels and reservoirs in which cells are moved and reactions are performed. Mechanical, electrical, magnetic, gravitational, centrifugal or other forces are used to move the cells and to expose them to reagents. For example, cells of whole blood are moved into a chamber containing hypotonic saline, which results in selective lysis of red blood cells after a 20-minute incubation. Next, the remaining cells (leukocytes) are moved into a wash chamber and finally, moved into a chamber containing a lysis buffer such as guanidine isothyocyanate. The leukocyte cell lysate is further processed for RNA isolation in the chip, or is then removed for further processing, for example, RNA extraction by standard methods. Alternatively, the microfluidics chip is a circular disk containing ficoll or another density reagent. The blood sample is injected into the center of the disc, the disc is rotated at a speed that generates a centrifugal force appropriate for density gradient separation of mononuclear cells, and the separated mononuclear cells are then harvested for further analysis or processing.

[0179] It is understood that the methods of expression evaluation, above, although discussed in the context of discovery of diagnostic nucleotide sets, are also applicable for expression evaluation when using diagnostic nucleotide sets for, e.g. diagnosis of diseases, as further discussed below.

[0180] Evaluation of Expression Patterns

[0181] Expression patterns can be evaluated by qualitative and/or quantitative measures. Certain of the above described techniques for evaluating gene expression (as RNA or protein products) yield data that are predominantly qualitative in nature. That is, the methods detect differences in expression that classify expression into distinct modes without providing significant information regarding quantitative aspects of expression. For example, a technique can be described as a qualitative technique if it detects the presence or absence of expression of a candidate nucleotide sequence, i.e., an on/off pattern of expression. Alternatively, a qualitative technique measures the presence (and/or absence) of different alleles, or variants, of a gene product.

[0182] In contrast, some methods provide data that characterizes expression in a quantitative manner. That is, the methods relate expression on a numerical scale, e.g., a scale of 0-5, a scale of 1-10, a scale of +-+++, from grade 1 to grade 5, a grade from a to z, or the like. It will be understood that the numerical, and symbolic examples provided are arbitrary, and that any graduated scale (or any symbolic representation of a graduated scale) can be employed in the context of the present invention to describe quantitative differences in nucleotide sequence expression. Typically, such methods yield information corresponding to a relative increase or decrease in expression.

[0183] Any method that yields either quantitative or qualitative expression data is suitable for evaluating expression of candidate nucleotide sequence in a subject sample of leukocytes. In some cases, e.g., when multiple methods are employed to determine expression patterns for a plurality of candidate nucleotide sequences, the recovered data, e.g., the expression profile, for the nucleotide sequences is a combination of quantitative and qualitative data.

[0184] In some applications, expression of the plurality of candidate nucleotide sequences is evaluated sequentially. This is typically the case for methods that can be characterized as low- to moderate-throughput. In contrast, as the throughput of the elected assay increases, expression for the plurality of candidate nucleotide sequences in a sample or multiple samples of leukocytes, is assayed simultaneously. Again, the methods (and throughput) are largely determined by the individual practitioner, although, typically, it is preferable to employ methods that permit rapid, e.g. automated or partially automated, preparation and detection, on a scale that is time-efficient and cost-effective.

[0185] It is understood that the preceding discussion, while directed at the assessment of expression of the members of candidate libraries, is also applies to the assessment of the expression of members of diagnostic nucleotide sets, as further discussed below.

[0186] Genotyping

[0187] In addition to, or in conjunction with the correlation of expression profiles and clinical data, it is often desirable to correlate expression patterns with the subject's genotype at one or more genetic loci. The selected loci can be, for example, chromosomal loci corresponding to one or more member of the candidate library, polymorphic alleles for marker loci, or alternative disease related loci (not contributing to the candidate library) known to be, or putatively associated with, a disease (or disease criterion). Indeed, it will be appreciated, that where a (polymorphic) allele at a locus is linked to a disease (or to a predisposition to a disease), the presence of the allele can itself be a disease criterion.

[0188] Numerous well known methods exist for evaluating the genotype of an individual, including southern analysis, restriction fragment length polymorphism (RFLP) analysis, polymerase chain reaction (PCR), amplification length polymorphism (AFLP) analysis, single stranded conformation polymorphism (SSCP) analysis, single nucleotide polymorphism (SNP) analysis (e.g., via PCR, Taqman or molecular beacons), among many other useful methods. Many such procedures are readily adaptable to high throughput and/or automated (or semi-automated) sample preparation and analysis methods. Most, can be performed on nucleic acid samples recovered via simple procedures from the same sample of leukocytes as yielded the material for expression profiling. Exemplary techniques are described in, e.g., Sambrook, and Ausubel, supra.

[0189] Identification of the Diagnostic Nucleotide Sets of the Invention

[0190] Identification of diagnostic nucleotide sets and disease specific target nucleotide sequence proceeds by correlating the leukocyte expression profiles with data regarding the subject's health status to produce a data set designated a “molecular signature.” Examples of data regarding a patient's health status, also termed “disease criteria(ion)”, is described below and in the Section titled “selected diseases,” below. Methods useful for correlation analysis are further described elsewhere in the specification.

[0191] Generally, relevant data regarding the subject's health status includes retrospective or prospective health data, e.g., in the form of the subject's medical history, as provided by the subject, physician or third party, such as, medical diagnoses, laboratory test results, diagnostic test results, clinical events, or medication lists, as further described below. Such data may include information regarding a patient's response to treatment and/or a particular medication and data regarding the presence of previously characterized “risk factors.” For example, cigarette smoking and obesity are previously identified risk factors for heart disease. Further examples of health status information, including diseases and disease criteria, is described in the section titled Selected diseases, below.

[0192] Typically, the data describes prior events and evaluations (i.e., retrospective data). However, it is envisioned that data collected subsequent to the sampling (i.e., prospective data) can also be correlated with the expression profile. The tissue sampled, e.g., peripheral blood, bronchial lavage, etc., can be obtained at one or more multiple time points and subject data is considered retrospective or prospective with respect to the time of sample procurement.

[0193] Data collected at multiple time points, called “longitudinal data”, is often useful, and thus, the invention encompasses the analysis of patient data collected from the same patient at different time points. Analysis of paired samples, such as samples from a patient at different time, allows identification of differences that are specifically related to the disease state since the genetic variability specific to the patient is controlled for by the comparison. Additionally, other variables that exist between patients may be controlled for in this way, for example, the presence or absence of inflammatory diseases (e.g., rheumatoid arthritis) the use of medications that may effect leukocyte gene expression, the presence or absence of co-morbid conditions, etc. Methods for analysis of paired samples are further described below. Moreover, the analysis of a pattern of expression profiles (generated by collecting multiple expression profiles) provides information relating to changes in expression level over time, and may permit the determination of a rate of change, a trajectory, or an expression curve. Two longitudinal samples may provide information on the change in expression of a gene over time, while three longitudinal samples may be necessary to determine the “trajectory” of expression of a gene. Such information may be relevant to the diagnosis of a disease. For example, the expression of a gene may vary from individual to individual, but a clinical event, for example, a heart attack, may cause the level of expression to double in each patient. In this example, clinically interesting information is gleaned from the change in expression level, as opposed to the absolute level of expression in each individual.

[0194] Generally, small sample sizes of 10-40 samples from 10-20 individuals are used to identify a diagnostic nucleotide set. Larger sample sizes are generally necessary to validate the diagnostic nucleotide set for use in large and varied patient populations, as further described below. For example, extension of gene expression correlations to varied ethnic groups, demographic groups, nations, peoples or races may require expression correlation experiments on the population of interest.

[0195] Expression Reference Standards

[0196] Expression profiles derived from a patient (i.e., subjects diagnosed with, or exhibiting symptoms of, or exhibiting a disease criterion, or under a doctor's care for a disease) sample are compared to a control or standard expression RNA to facilitate comparison of expression profiles (e.g. of a set of candidate nucleotide sequences) from a group of patients relative to each other (i.e., from one patient in the group to other patients in the group, or to patients in another group).

[0197] For example, in one approach to identifying diagnostic nucleotide sets, expression profiles derived from patient samples are compared to a expression reference “standard.” Standard expression reference can be, for example, RNA derived from resting cultured leukocytes or commercially available reference RNA, such as Universal reference RNA from Stratagene. See Nature, V406, 8-17-00, p. 747-752. Use of an expression reference standard is particularly useful when the expression of large numbers of nucleotide sequences is assayed, e.g. in an array, and in certain other applications, e.g. qualitative PCR, RT-PCR, etc., where it is desirable to compare a sample profile to a standard profile, and/or when large numbers of expression profiles, e.g. a patient population, are to be compared. Generally, an expression reference standard should be available in large quantities, should be a good substrate for amplification and labeling reactions, and should be capable of detecting a large percentage of candidate nucleic acids using suitable expression profiling technology.

[0198] Alternatively, or in addition, the expression profile derived from a patient sample is compared with the expression of an internal reference control gene, for example, β-actin or CD4. The relative expression of the profiled genes and the internal reference control gene (from the same individual) is obtained. An internal reference control may also be used with a reference RNA. For example, an expression profile for “gene 1” and the gene encoding CD4 can be determined in a patient sample and in a reference RNA. The expression of each gene can be expressed as the “relative” ratio of expression the gene in the patient sample compared with expression of the gene in the reference RNA. The expression ratio (sample/reference) for gene 1 may be divided by the expression ration for CD4 (sample/reference) and thus the relative expression of gene 1 to CD4 is obtained.

[0199] The invention also provides a buffy coat control RNA useful for expression profiling, and a method of using control RNA produced from a population of buffy coat cells, the white blood cell layer derived from the centrifugation of whole blood. Buffy coat contains all white blood cells, including granulocytes, mononuclear cells and platelets. The invention also provides a method of preparing control RNA from buffy coat cells for use in expression profile analysis of leukocytes. Buffy coat fractions are obtained, e.g. from a blood bank or directly from individuals, preferably from a large number of individuals such that bias from individual samples is avoided and so that the RNA sample represents an average expression of a healthy population. Buffy coat fractions from about 50 or about 100, or more individuals are preferred. 10 ml buffy coat from each individual is used. Buffy coat samples are treated with an erthythrocyte lysis buffer, so that erthythrocytes are selectively removed. The leukocytes of the buffy coat layer are collected by centrifugation. Alternatively, the buffy cell sample can be further enriched for a particular leukocyte sub-populations, e.g. mononuclear cells, T-lymphocytes, etc. To enrich for mononuclear cells, the buffy cell pellet, above, is diluted in PBS (phosphate buffered saline) and loaded onto a non-polystyrene tube containing a polysucrose and sodium diatrizoate solution adjusted to a density of 1.077+/−0.001 g/ml. To enrich for T-lymphocytes, 45 ml of whole blood is treated with RosetteSep (Stem Cell Technologies), and incubated at room temperature for 20 minutes. The mixture is diluted with an equal volume of PBS plus 2% FBS and mixed by inversion. 30 ml of diluted mixture is layered on top of 15 ml DML medium (Stem Cell Technologies). The tube is centrifuged at 1200×g, and the enriched cell layer at the plasma: medium interface is removed, washed with PBS+2% FBS, and cells collected by centrifugation at 1200×g. The cell pellet is treated with 5 ml of erythrocyte lysis buffer (EL buffer, Qiagen) for 10 minutes on ice, and enriched T-lymphoctes are collected by centrifugation.

[0200] In addition or alternatively, the buffy cells (whole buffy coat or sub-population, e.g. mononuclear fraction) can be cultured in vitro and subjected to stimulation with cytokines or activating chemicals such as phorbol esters or ionomycin. Such stimuli may increase expression of nucleotide sequences that are expressed in activated immune cells and might be of interest for leukocyte expression profiling experiments.

[0201] Following sub-population selection and/or further treatment, e.g. stimulation as described above, RNA is prepared using standard methods. For example, cells are pelleted and lysed with a phenol/guanidinium thiocyanate and RNA is prepared. RNA can also be isolated using a silica gel-based purification column or the column method can be used on RNA isolated by the phenol/guanidinium thiocyanate method. RNA from individual buffy coat samples can be pooled during this process, so that the resulting reference RNA represents the RNA of many individuals and individual bias is minimized or eliminated. In addition, a new batch of buffy coat reference RNA can be directly compared to the last batch to ensure similar expression pattern from one batch to another, using methods of collecting and comparing expression profiles described above/below. One or more expression reference controls are used in an experiment. For example, RNA derived from one or more of the following sources can be used as controls for an experiment: stimulated or unstimulated whole buffy coat, stimulated or unstimulated peripheral mononuclear cells, or stimulated or unstimulated T-lymphocytes.

[0202] Alternatively, the expression reference standard can be derived from any subject or class of subjects including healthy subjects or subjects diagnosed with the same or a different disease or disease criterion. Expression profiles from subjects in two distinct classes are compared to determine which subset of nucleotide sequences in the candidate library best distinguish between the two subject classes, as further discussed below. It will be appreciated that in the present context, the term “distinct classes” is relevant to at least one distinguishable criterion relevant to a disease of interest, a “disease criterion.” The classes can, of course, demonstrate significant overlap (or identity) with respect to other disease criteria, or with respect to disease diagnoses, prognoses, or the like. The mode of discovery involves, e.g., comparing the molecular signature of different subject classes to each other (such as patient to control, patients with a first diagnosis to patients with a second diagnosis, etc.) or by comparing the molecular signatures of a single individual taken at different time points. The invention can be applied to a broad range of diseases, disease criteria, conditions and other clinical and/or epidemiological questions, as further discussed above/below.

[0203] It is appreciated that while the present discussion pertains to the use of expression reference controls while identifying diagnostic nucleotide sets, expression reference controls are also useful during use of diagnostic nucleotide sets, e.g. use of a diagnostic nucleotide set for diagnosis of a disease, as further described below.

[0204] Analysis of Expression Profiles

[0205] In order to facilitate ready access, e.g., for comparison, review, recovery, and/or modification, the molecular signatures/expression profiles are typically recorded in a database. Most typically, the database is a relational database accessible by a computational device, although other formats, e.g., manually accessible indexed files of expression profiles as photographs, analogue or digital imaging readouts, spreadsheets, etc. can be used. Further details regarding preferred embodiments are provided below. Regardless of whether the expression patterns initially recorded are analog or digital in nature and/or whether they represent quantitative or qualitative differences in expression, the expression patterns, expression profiles (collective expression patterns), and molecular signatures (correlated expression patterns) are stored digitally and accessed via a database. Typically, the database is compiled and maintained at a central facility, with access being available locally and/or remotely.

[0206] As additional samples are obtained, and their expression profiles determined and correlated with relevant subject data, the ensuing molecular signatures are likewise recorded in the database. However, rather than each subsequent addition being added in an essentially passive manner in which the data from one sample has little relation to data from a second (prior or subsequent) sample, the algorithms optionally additionally query additional samples against the existing database to further refine the association between a molecular signature and disease criterion. Furthermore, the data set comprising the one (or more) molecular signatures is optionally queried against an expanding set of additional or other disease criteria. The use of the database in integrated systems and web embodiments is further described below.

Analysis of Expression Profile Data from Arrays

[0207] Expression data is analyzed using methods well known in the art, including the software packages Imagene (Biodiscovery, Marina del Rey, Calif.), Feature Extraction (Agilent, Palo Alto, Calif.), and Scanalyze (Stanford University). In the discussion that follows, a “feature” refers to an individual spot of DNA on an array. Each gene may have more than one feature. For example, hybridized microarrays are scanned and analyzed on an Axon Instruments scanner using GenePix 3.0 software (Axon Instruments, Union City, Calif.). The data extracted by GenePix is used for all downstream quality control and expression evaluation. The data is derived as follows. The data for all features flagged as “not found” by the software is removed from the dataset for individual hybridizations. The “not found” flag by GenePix indicates that the software was unable to discriminate the feature from the background. Each feature is examined to determine the value of its signal. The median pixel intensity of the background (Bₙ) is subtracted from the median pixel intensity of the feature (Fₙ) to produce the background-subtracted signal (hereinafter, “BGSS”). The BGSS is divided by the standard deviation of the background pixels to provide the signal-to-noise ratio (hereinafter, “S/N”). Features with a S/N of three or greater in both the Cy3 channel (corresponding to the sample RNA) and Cy5 channel (corresponding to the reference RNA) are used for further analysis (hereinafter denoted “useable features”). Alternatively, different S/Ns are used for selecting expression data for an analysis. For example, only expression data with signal to noise ratios >3 might be used in an analysis.

[0208] For each usable feature (i), the expression level (e) is expressed as the logarithm of the ratio (R) of the Background Subtracted Signal (hereinafter “BGSS”) for the Cy3 (sample RNA) channel divided by the BGSS for the Cy5 channel (reference RNA). This “log ratio” value is used for comparison to other experiments.

$$\begin{matrix}{R}_{i} = \frac{{BGSS}_{sample}}{{BGSS}_{reference}} & ( 0.1 ) \\ {e}_{i} = log {r}_{i} & ( 0.2 )\end{matrix}$$

[0209] Variation in signal across hybridizations may be caused by a number of factors affecting hybridization, DNA spotting, wash conditions, and labeling efficiency.

[0210] A single reference RNA may be used with all of the experimental RNAs, permitting multiple comparisons in addition to individual comparisons. By comparing sample RNAs to the same reference, the gene expression levels from each sample are compared across arrays, permitting the use of a consistent denominator for our experimental ratios.

[0211] Scaling

[0212] The data may be scaled (normalized) to control for labeling and hybridization variability within the experiment, using methods known in the art. Scaling is desirable because it facilitates the comparison of data between different experiments, patients, etc. Generally the BGSS are scaled to a factor such as the median, the mean, the trimmed mean, and percentile. Additional methods of scaling include: to scale between 0 and 1, to subtract the mean, or to subtract the median.

[0213] Scaling is also performed by comparison to expression patterns obtained using a common reference RNA, as described in greater detail above. As with other scaling methods, the reference RNA facilitates multiple comparisons of the expression data, e.g., between patients, between samples, etc. Use of a reference RNA provides a consistent denominator for experimental ratios.

[0214] In addition to the use of a reference RNA, individual expression levels may be adjusted to correct for differences in labeling efficiency between different hybridization experiments, allowing direct comparison between experiments with different overall signal intensities, for example. A scaling factor (a) may be used to adjust individual expression levels as follows. The median of the scaling factor (a), for example, BGSS, is determined for the set of all features with a S/N greater than three. Next, the BGSSᵢ (the BGSS for each feature “i”) is divided by the median for all features (a), generating a scaled ratio. The scaled ration is used to determine the expression value for the feature (eᵢ), or the log ratio.

$$\begin{matrix}{S}_{i} = \frac{{BGSS}_{i}}{a} & ( 0.3 ) \\ {e}_{i} = log ( \frac{Cy 3 {S}_{i}}{Cy 5 {S}_{i}} ) & ( 0.4 )\end{matrix}$$

[0215] In addition, or alternatively, control features are used to normalize the data for labeling and hybridization variability within the experiment. Control feature may be cDNA for genes from the plant, Arabidopsis thaliana, that are included when spotting the mini-array. Equal amounts of RNA complementary to control cDNAs are added to each of the samples before they were labeled. Using the signal from these control genes, a normalization constant (L) is determined according to the following formula:

$${L}_{j} = \frac{\frac{{\sum }_{i = 1}^{N} {BGSS}_{j , i}}{N}}{\frac{{\sum }_{j = 1}^{K} \frac{{\sum }_{i = 1}^{N} {BGSS}_{j , i}}{N}}{K} }$$

where BGSSᵢ is the signal for a specific feature, N is the number of A. thaliana control features, K is the number of hybridizations, and Lⱼ is the normalization constant for each individual hybridization.

[0216] Using the formula above, the mean for all control features of a particular hybridization and dye (e.g., Cy3) is calculated. The control feature means for all Cy3 hybridizations are averaged, and the control feature mean in one hybridization divided by the average of all hybridizations to generate a normalization constant for that particular Cy3 hybridization (Lⱼ), which is used as a in equation (0.3). The same normalization steps may be performed for Cy3 and Cy5 values.

[0217] Many additional methods for normalization exist and can be applied to the data. In one method, the average ratio of Cy3 BGSS/Cy5 BGSS is determined for all features on an array. This ratio is then scaled to some arbitrary number, such as 1 or some other number. The ratio for each probe is then multiplied by the scaling factor required to bring the average ratio to the chosen level. This is performed for each array in an analysis. Alternatively, the ratios are normalized to the average ratio across all arrays in an analysis.

[0218] Correlation Analysis

[0219] Correlation analysis is performed to determine which array probes have expression behavior that best distinguishes or serves as markers for relevant groups of samples representing a particular clinical condition. Correlation analysis, or comparison among samples representing different disease criteria (e.g., clinical conditions), is performed using standard statistical methods. Numerous algorithms are useful for correlation analysis of expression data, and the selection of algorithms depends in part on the data analysis to be performed. For example, algorithms can be used to identify the single most informative gene with expression behavior that reliably classifies samples, or to identify all the genes useful to classify samples. Alternatively, algorithms can be applied that determine which set of 2 or more genes have collective expression behavior that accurately classifies samples. The use of multiple expression markers for diagnostics may overcome the variability in expression of a gene between individuals, or overcome the variability intrinsic to the assay. Multiple expression markers may include redundant markers, in that two or more genes or probes may provide the same information with respect to diagnosis. This may occur, for example, when two or more genes or gene probes are coordinately expressed. It will be appreciated that while the discussion above pertains to the analysis of RNA expression profiles the discussion is equally applicable to the analysis of profiles of proteins or other molecular markers.

[0220] Prior to analysis, expression profile data may be formatted or prepared for analysis using methods known in the art. For example, often the log ratio of scaled expression data for every array probe is calculated using the following formula:

[0221] log (Cy 3 BGSS/Cy5 BGSS), where Cy 3 signal corresponds to the expression of the gene in the clinical sample, and Cy5 signal corresponds to expression of the gene in the reference RNA.

[0222] Data may be further filtered depending on the specific analysis to be done as noted below. For example, filtering may be aimed at selecting only samples with expression above a certain level, or probes with variability above a certain level between sample sets.

[0223] The following non-limiting discussion consider several statistical methods known in the art. Briefly, the t-test and ANOVA are used to identify single genes with expression differences between or among populations, respectively. Multivariate methods are used to identify a set of two or more genes for which expression discriminates between two disease states more specifically than expression of any single gene.

[0224] t-test

[0225] The simplest measure of a difference between two groups is the Student's t test. See, e.g., Welsh et al. (2001) Proc Natl Acad Sci USA 98:1176-81 (demonstrating the use of an unpaired Student's t-test for the discovery of differential gene expression in ovarian cancer samples and control tissue samples). The t-test assumes equal variance and normally distributed data. This test identifies the probability that there is a difference in expression of a single gene between two groups of samples. The number of samples within each group that is required to achieve statistical significance is dependent upon the variation among the samples within each group. The standard formula for a t-test is:

$$t ( {e}_{i} ) = \frac{{\overline{e}}_{i , c} - {\overline{e}}_{i , t}}{\sqrt{( {s}_{i , c}^{2} / {n}_{c} ) + ( {s}_{i , t}^{2} / {n}_{t} )}} , \qquad ( 0.5 )$$

[0226] where e̅ᵢ is the difference between the mean expression level of gene i in groups c and t, s_{i,c} is the variance of gene x in group c and s_{i,t} is the variance of gene x in group t. n_{c} and nₜ are the numbers of samples in groups c and t.

[0227] The combination of the t statistic and the degrees of freedom [min(nₜ, n_{c})−1] provides a p value, the probability of rejecting the null hypothesis. A p-value of ≦0.01, signifying a 99 percent probability the mean expression levels are different between the two groups (a 1% chance that the mean expression levels are in fact not different and that the observed difference occurred by statistical chance), is often considered acceptable.

[0228] When performing tests on a large scale, for example, on a large dataset of about 8000 genes, a correction factor must be included to adjust for the number of individual tests being performed. The most common and simplest correction is the Bonferroni correction for multiple tests, which divides the p-value by the number of tests run. Using this test on an 8000 member dataset indicates that a p value of ≦0.00000125 is required to identify genes that are likely to be truly different between the two test conditions.

[0229] Wilcoxon's Signed Ranks Test

[0230] This method is non-parametric and is utilized for paired comparisons. See e.g., Sokal and Rohlf (1987) Introduction to Biostatistics 2^{nd} edition, WH Freeman, New York. At least 6 pairs are necessary to apply this statistic. This test is useful for analysis of paired expression data (for example, a set of patients who have cardiac transplant biopsy on 2 occasions and have a grade 0 on one occasion and a grade 3A on another).

[0231] ANOVA

[0232] Differences in gene expression across multiple related groups may be assessed using an Analysis of Variance (ANOVA), a method well known in the art (Michelson and Schofield, 1996).

[0233] Multivariate Analysis

[0234] Many algorithms suitable for multivariate analysis are known in the art. Generally, a set of two or more genes for which expression discriminates between two disease states more specifically than expression of any single gene is identified by searching through the possible combinations of genes using a criterion for discrimination, for example the expression of gene X must increase from normal 300 percent, while the expression of genes Y and Z must decrease from normal by 75 percent. Ordinarily, the search starts with a single gene, then adds the next best fit at each step of the search. Alternatively, the search starts with all of the genes and genes that do not aid in the discrimination are eliminated step-wise.

[0235] Paired Samples

[0236] Paired samples, or samples collected at different time-points from the same patient, are often useful, as described above. For example, use of paired samples permits the reduction of variation due to genetic variation among individuals. In addition, the use of paired samples has a statistical significance, in that data derived from paired samples can be calculated in a different manner that recognizes the reduced variability. For example, the formula for a t-test for paired samples is:

$$t ( {e}_{x} ) = \frac{{\overline{D}}_{\overline{e} x}}{\sqrt{\frac{\sum {D}^{2} - {( \sum D )}^{2} / b}{b - 1}}} , \qquad ( 0.5 )$$

[0237] where D is the difference between each set of paired samples and b is the number of sample pairs. D̅ is the mean of the differences between the members of the pairs. In this test, only the differences between the paired samples are considered, then grouped together (as opposed to taking all possible differences between groups, as would be the case with an ordinary t-test). Additional statistical tests useful with paired data, e.g., ANOVA and Wilcoxon's signed rank test, are discussed above.

[0238] Diagnostic Classification

[0239] Once a discriminating set of genes is identified, the diagnostic classifier (a mathematical function that assigns samples to diagnostic categories based on expression data) is applied to unknown sample expression levels.

[0240] Methods that can be used for this analysis include the following non-limiting list:

[0241] CLEAVER is an algorithm used for classification of useful expression profile data. See Raychaudhuri et al. (2001) Trends Biotechnol 19:189-193. CLEAVER uses positive training samples (e.g., expression profiles from samples known to be derived from a particular patient or sample diagnostic category, disease or disease criteria), negative training samples (e.g., expression profiles from samples known not to be derived from a particular patient or sample diagnostic category, disease or disease criteria) and test samples (e.g., expression profiles obtained from a patient), and determines whether the test sample correlates with the particular disease or disease criteria, or does not correlate with a particular disease or disease criteria. CLEAVER also generates a list of the 20 most predictive genes for classification.

[0242] Artificial neural networks (hereinafter, “ANN”) can be used to recognize patterns in complex data sets and can discover expression criteria that classify samples into more than 2 groups. The use of artificial neural networks for discovery of gene expression diagnostics for cancers using expression data generated by oligonucleotide expression microarrays is demonstrated by Khan et al. (2001) Nature Med. 7:673-9. Khan found that 96 genes provided 0% error rate in classification of the tumors. The most important of these genes for classification was then determined by measuring the sensitivity of the classification to a change in expression of each gene. Hierarchical clustering using the 96 genes results in correct grouping of the cancers into diagnostic categories.

[0243] Golub uses cDNA microarrays and a distinction calculation to identify genes with expression behavior that distinguishes myeloid and lymphoid leukemias. See Golub et al. (1999) Science 286:531-7. Self organizing maps were used for new class discovery. Cross validation was done with a “leave one out” analysis. 50 genes were identified as useful markers. This was reduced to as few as 10 genes with equivalent diagnostic accuracy.

[0244] Hierarchical and non-hierarchical clustering methods are also useful for identifying groups of genes that correlate with a subset of clinical samples such as with transplant rejection grade. Alizadeh used hierarchical clustering as the primary tool to distinguish different types of diffuse B-cell lymphomas based on gene expression profile data. See Alizadeh et al. (2000) Nature 403:503-11. Alizadeh used hierarchical clustering as the primary tool to distinguish different types of diffuse B-cell lymphomas based on gene expression profile data. A cDNA array carrying 17856 probes was used for these experiments, 96 samples were assessed on 128 arrays, and a set of 380 genes was identified as being useful for sample classification.

[0245] Perou demonstrates the use of hierarchical clustering for the molecular classification of breast tumor samples based on expression profile data. See Perou et al. (2000) Nature 406:747-52. In this work, a cDNA array carrying 8102 gene probes was used. 1753 of these genes were found to have high variation between breast tumors and were used for the analysis.

[0246] Hastie describes the use of gene shaving for discovery of expression markers. Hastie et al. (2000) Genome Biol. 1(2):RESEARCH 0003.1-0003.21. The gene shaving algorithm identifies sets of genes with similar or coherent expression patterns, but large variation across conditions (RNA samples, sample classes, patient classes). In this manner, genes with a tight expression pattern within a transplant rejection grade, but also with high variability across rejection grades are grouped together. The algorithm takes advantage of both characteristics in one grouping step. For example, gene shaving can identify useful marker genes with co-regulated expression. Sets of useful marker genes can be reduced to a smaller set, with each gene providing some non-redundant value in classification. This algorithm was used on the data set described in Alizadeh et al., supra, and the set of 380 informative gene markers was reduced to 234.

[0247] Selected Diseases

[0248] In principle, diagnostic nucleotide sets of the invention may be developed and applied to essentially any disease, or disease criterion, as long as at least one subset of nucleotide sequences is differentially expressed in samples derived from one or more individuals with a disease criteria or disease and one or more individuals without the disease criteria or disease, wherein the individual may be the same individual sampled at different points in time, or the individuals may be different individuals (or populations of individuals). For example, the subset of nucleotide sequences may be differentially expressed in the sampled tissues of subjects with the disease or disease criterion (e.g., a patient with a disease or disease criteria) as compared to subjects without the disease or disease criterion (e.g., patients without a disease (control patients)). Alternatively, or in addition, the subset of nucleotide sequence(s) may be differentially expressed in different samples taken from the same patient, e.g at different points in time, at different disease stages, before and after a treatment, in the presence or absence of a risk factor, etc.

[0249] Expression profiles corresponding to sets of nucleotide sequences that correlate not with a diagnosis, but rather with a particular aspect of a disease can also be used to identify the diagnostic nucleotide sets and disease specific target nucleotide sequences of the invention. For example, such an aspect, or disease criterion, can relate to a subject's medical or family history, e.g., childhood illness, cause of death of a parent or other relative, prior surgery or other intervention, medications, symptoms (including onset and/or duration of symptoms), etc. Alternatively, the disease criterion can relate to a diagnosis, e.g., hypertension, diabetes, atherosclerosis, or prognosis (e.g., prediction of future diagnoses, events or complications), e.g., acute myocardial infarction, restenosis following angioplasty, reperfusion injury, allograft rejection, rheumatoid arthritis or systemic lupus erythematosis disease activity or the like. In other cases, the disease criterion corresponds to a therapeutic outcome, e.g., transplant rejection, bypass surgery or response to a medication, restenosis after stent implantation, collateral vessel growth due to therapeutic angiogenesis therapy, decreased angina due to revascularization, resolution of symptoms associated with a myriad of therapies, and the like. Alternatively, the disease criteria corresponds with previously identified or classic risk factors and may correspond to prognosis or future disease diagnosis. As indicated above, a disease criterion can also correspond to genotype for one or more loci. Disease criteria (including patient data) may be collected (and compared) from the same patient at different points in time, from different patients, between patients with a disease (criterion) and patients respresenting a control population, etc. Longitudinal data, i.e., data collected at different time points from an individual (or group of individuals) may be used for comparisons of samples obtained from an individual (group of individuals) at different points in time, to permit identification of differences specifically related to the disease state, and to obtain information relating to the change in expression over time, including a rate of change or trajectory of expression over time. The usefulness of longitudinal data is further discussed in the section titled “Identification of diagnostic nucleotide sets of the invention”.

[0250] It is further understood that diagnostic nucleotide sets may be developed for use in diagnosing conditions for which there is no present means of diagnosis. For example, in rheumatoid arthritis, joint destruction is often well under way before a patient experience symptoms of the condition. A diagnostic nucleotide set may be developed that diagnoses rheumatic joint destruction at an earlier stage than would be possible using present means of diagnosis, which rely in part on the presentation of symptoms by a patient. Diagnostic nucleotide sets may also be developed to replace or augment current diagnostic procedures. For example, the use of a diagnostic nucleotide set to diagnose cardiac allograft rejection may replace the current diagnostic test, a graft biopsy.

[0251] It is understood that the following discussion of diseases is exemplary and non-limiting, and further that the general criteria discussed above, e.g. use of family medical history, are generally applicable to the specific diseases discussed below.

[0252] In addition to leukocytes, as described throughout, the general method is applicable to nucleotide sequences that are differentially expressed in any subject tissue or cell type, by the collection and assessment of samples of that tissue or cell type. However, in many cases, collection of such samples presents significant technical or medical problems given the current state of the art.

[0253] Organ Transplant Rejection and Success

[0254] A frequent complication of organ transplantation is recognition of the transplanted organ as foreign by the immune system resulting in rejection. Diagnostic nucleotide sets can be identified and validated for monitoring organ transplant success, rejection and treatment. Medications currently exist that suppress the immune system, and thereby decrease the rate of and severity of rejection. However, these drugs also suppress the physiologic immune responses, leaving the patient susceptible to a wide variety of opportunistic infections. At present there is no easy, reliable way to diagnose transplant rejection. Organ biopsy is the preferred method, but this is expensive, painful and associated with significant risk and has inadequate sensitivity for focal rejection.

[0255] Diagnostic nucleotide sets of the present invention can be developed and validated for use as diagnostic tests for transplant rejection and success. It is appreciated that the methods of identifying diagnostic nucleotide sets are applicable to any organ transplant population. For example, diagnostic nucleotide sets are developed for cardiac allograft rejection and success. In some cases, disease criteria correspond to acute stage rejection diagnosis based on organ biopsy and graded using the International Society for Heart and Lung Transplantation (“ISHLT”) criteria. Other disease criteria correspond to information from the patient's medical history and information regarding the organ donor. Alternatively, disease criteria include the presence or absence of cytomegalovirus (CMV) infection, Epstein-Barr virus (EBV) infection, allograft dysfunction measured by physiological tests of cardiac function (e.g., hemodynamic measurements from catheterization or echocardiograph data), and symptoms of other infections. Alternatively, disease criteria corresponds to therapeutic outcome, e.g. graft failure, re-transplantation, transplant vasculopathy, response to immunosuppressive medications, etc. Disease criteria may further correspond to a rejection episode of at least moderate histologic grade, which results in treatment of the patient with additional corticosteroids, anti-T cell antibodies, or total lymphoid irradiation; a rejection with histologic grade 2 or higher; a rejection with histologic grade <2; the absence of histologic rejection and normal or unchanged allograft function (based on hemodynamic measurements from catheterization or on echocardiographic data); the presence of severe allograft dysfunction or worsening allograft dysfunction during the study period (based on hemodynamic measurements from catheterization or on echocardiographic data).; documented CMV infection by culture, histology, or PCR, and at least one clinical sign or symptom of infection; specific graft biopsy rejection grades; rejection of mild to moderate histologic severity prompting augmentation of the patient's chronic immunosuppressive regimen; rejection of mild to moderate severity with allograft dysfunction prompting plasmaphoresis or a diagnosis of “humoral” rejection; infections other than CMV, especially infection with Epstein Barr virus (EBV); lymphoproliferative disorder (also called post-transplant lymphoma); transplant vasculopathy diagnosed by increased intimal thickness on intravascular ultrasound (IVUS), angiography, or acute myocardial infarction; graft failure or retransplantation; and all cause mortality. Further specific examples of clinical data useful as disease criteria are provided in Example 11.

[0256] In another example, diagnostic nucleotide sets are developed and validated for use in treatment of kidney allograft rejection. Disease criteria correspond to, e.g., results of biopsy analysis for kidney allograft rejection, serum creatine level, and urinalysis results. Another disease criteria corresponds to the need for hemodialysis or other renal replacement therapy. Diagnostic nucleotide sets are developed and validated for use in diagnosis and treatment of bone marrow transplant rejection and liver transplant rejection, respectively. Disease criteria for bone marrow transplant rejection correspond to the diagnosis and monitoring of graft rejection and/or graft versus host disease. Disease criteria for liver transplant rejection include levels of serum markers for liver damage and liver function such as AST (aspartate aminotransferase), ALT (alanine aminotransferase), Alkaline phosphatase, GGT, (gamma-glutamyl transpeptidase) Bilirubin, Albumin and Prothrombin time. Further disease criteria correspond to hepatic encephalopathy, medication usage, ascites, and histological rejection on graft biopsy. In addition, urine can be utilized for at the target tissue for profiling in renal transplant, while biliary and intestinal and feces may be used favorably for hepatic or intestinal organ allograft rejection.

[0257] Atherosclerosis and Stable Angina Pectoris

[0258] Over 50 million patients in the U.S. have atherosclerotic coronary artery disease (hereinafter, “CAD”), and it is of great importance to identify patients who will suffer complications from the disease. Atherosclerosis leads to progressive narrowing of the coronary arteries, which may lead to myocardial ischemia, which manifests as stable angina pectoris, or chest pain with exertion. In addition to chest pain, patients may also have shortness of breath (dyspnea), fatigue, nausea or other symptoms with exertion. Myocardial infarction (heart attack) and unstable angina are acute events associated with atherosclerosis. There is currently no way to accurately predict the occurrence of acute events in patients with atherosclerosis, however. Although the presence of classic risk factors and arterial wall calcification (as assessed by CT scanning) is weakly correlated with the occurrence of acute coronary syndrome, the degree of artery stenosis (i.e. vessel occlusion as a result of atherosclerosis) correlates poorly with the occurrence of future acute events, as acute events occur more commonly in coronary arteries with 40-50% blockage than arteries that are 80-90% blocked. Coronary angiography can provide information about degree of coronary blockage, but is a poor tool for the measurement of disease activity and the prediction of the likelihood of acute events and other poor outcomes.

[0259] Diagnostic nucleotide sets are developed and validated for use in diagnosis and monitoring of atherosclerosis, and in predicting the likelihood of complications, e.g. angina and myocardial infarction. Alternatively, or in addition, disease criteria correspond to symptoms or diagnosis of disease progression, e.g. clinical results of angiography indicating progressive narrowing of vessel lumens. In another aspect, diagnostic nucleotide sets are developed for use in predicting the likelihood of future acute events in patients suffering from atherosclerosis. Disease criteria correspond to retrospective data, for example a recent history of unstable angina or myocardial infarction. Disease criteria also correspond to prospective data, for example, the occurrence of unstable angina or myocardial infarction. In another case, disease criteria correspond to standard medical indicators of occurrence of an acute event, e.g. serum enzyme levels, electrocardiographic testing, chest pain, nuclear magnetic imaging, etc.

[0260] Congestive Heart Failure

[0261] Congestive heart failure (hereinafter, “CHF”) is a disease that affects increasing numbers of individuals. Without being bound by theory, it is believed that CHF is associated with systemic inflammation. Markers of systemic inflammation and serum cytokine levels such as erythrocyte sedimentation rate (ESR) and C-reactive protein (CRP) and serum cytokine levels are elevated (or altered) in patients with CHF, and elevation correlates with the severity and progression of the disease. Furthermore, serum catecholamine levels (epinephrine and norepinephrine) are also elevated in proportion to the severity of CHF, and may directly alter leukocyte expression patterns. Currently, echocardiography is the test primarily used to assess the severity of CHF and monitor progression of the disease. There are a number of drugs that are efficacious in treating CHF, such as beta-blockers and ACE inhibitors. A leukocyte test with the ability to determine the rate of progression and the adequacy of therapy is of great interest.

[0262] Diagnostic nucleotide sets are developed and validated for use in diagnosis and monitoring of progression and rate of progression (activity) of CHF. Disease criteria correspond to the results of echocardiography testing, which may indicate diagnosis of CHF or increasing severity of CHF as evidenced by worsening parameters for ventricular function, such as the ejection fraction, fractional shortening, wall motion or ventricular pressures. Alternatively, or in addition, disease criteria correspond to hospitalization for CHF, death, pulmonary edema, increased cardiac chamber dimensions on echocardiography or another imaging test, exercise testing of hemodynamic measurements, serial CRP, other serum markers, NYHA functional classes, quality of life measures, renal function, transplant listing, pulmonary edema, left ventricular assist device use, medication use and changes, and worsening of Ejection Fraction by echocardiography, angiography, MRI, CT or nuclear imaging. In another aspect, disease criteria correspond to response to drug therapy, e.g. beta-blockers or ACE inhibitors.

[0263] Risk Factors for Coronary Artery Disease

[0264] The established and classic risks for the occurrence of coronary artery disease and complications of that disease are: cigarette smoking, diabetes, hypertension, hyperlipidemia and a family history of early atherosclerosis. Obesity, sedentary lifestyle, syndrome X, cocaine use, chronic hemodialysis and renal disease, radiation exposure, endothelial dysfunction, elevated plasma homocysteine, elevated plasma lipoprotein a, elevated CRP, infection with CMV and chlamydia infection are less well established, controversial, or putative risk factors for the disease. Risk factors are known to be associated with patient prognosis and outcome, but the contribution of each risk factor to the future clinical state of a patient is difficult to measure. The effect of risk factor modification (e.g., smoking cessation, treatment of hypercholesterolemia) on overall risk and future outcome is also difficult to quantify.

[0265] Diagnostic nucleotide sets may be developed that correlate with these risk factors, or the sum of the risk factors for use in predicting occurrence of coronary artery disease. Disease criteria correspond to risk factors, as exemplified above, as well as to occurrence of coronary artery disease. Alternatively, or in addition, disease criteria corresponding to risk factors may contribute to a numerical weighted average, which itself may be treated as a disease criteria and may be used for correlation to gene expression. In another aspect, risk factors may be modified in a patient, e.g. by behavioral change, or decrease cholesterol through chemotherapy in patients with hypocholesteremia. Disease criteria may further correspond to diagnosis of coronary disease.

[0266] Restenosis

[0267] Angioplasty can re-open a narrowed artery. However, the long-term success rate of these procedures is limited by restenosis, the re-narrowing of a coronary artery after an angioplasty. Currently, about 50% of treated arteries re-narrow after angioplasty and about 30% re-narrow after standard stent placement. Restenosis usually becomes apparent within 3 months of the angioplasty procedure. Presently, there is no reliable method for predicting which arteries will succumb to restenosis, though small vessels tend to be more likely to re-narrow, as do vessels of diabetics, renal patients and vessels exposed to high-pressure balloon inflation during balloon angioplasty.

[0268] Diagnostic nucleotide sets are developed and validated to predict restenosis in patients before undergoing angioplasty or shortly thereafter. Disease criteria correspond to angiogram testing (diagnosis of restenosis), as well as clinical symptoms of restenosis, e.g. chest pain due to re-narrowing of the artery, as confirmed by angiogram. Anti-restenotic drug therapy is also identified for each patient. The diagnostic nucleotide set are useful to identify patients about to undergo angioplasty who would benefit from stents, radiation-emitting stents, and anti-restenotic drug delivering stents. Patients that would benefit from post-angioplasty anti-restenotic drug therapy may also be identified.

[0269] Rheumatoid Arthritis

[0270] Rheumatoid arthritis (RA) effects about two million patients in the US and is a chronic and debilitating inflammatory arthritis, particularly involving pain and destruction of the joints. RA often goes undiagnosed because patients may have no pain, but the disease is actively destroying the joint. Other patients are known to have RA, and are treated to alleviate symptoms, but the rate of progression of joint destruction can't easily be monitored. Drug therapy is available, but the most effective medicines are toxic (e.g., steroids, methotrexate) and thus need to be used with caution. A new class of medications (TNF blockers) is very effective, but the drugs are expensive, have side effects, and not all patients respond. Side-effects are common and include immune suppression, toxicity to organ systems, allergy and metabolic disturbances.

[0271] Diagnostic nucleotide sets of the invention are developed and validated for use in diagnosis and treatment of RA. Disease criteria correspond to disease symptoms (e.g., joint pain, joint swelling and joint stiffness and any of the American College for Rheumatology criteria for the diagnosis of RA, see Arnett et al (1988) Arthr. Rheum. 31:315-24), progression of joint destruction (e.g. as measured by serial hand radiographs, assessment ofjoint function and mobility), surgery, need for medication, additional diagnoses of inflammatory and non-inflammatory conditions, and clinical laboratory measurements including complete blood counts with differentials, CRP, ESR, ANA, Serum IL6, Soluble CD40 ligand, LDL, HDL, Anti-DNA antibodies, rheumatoid factor, C3, C4, serum creatinine. In addition, or alternatively, disease criteria correspond to response to drug therapy and presence or absence of side-effects or measures of improvement exemplified by the American College of Rheumatology “20%” and “50%” response/improvement rates. See Felson et al (1995) Arthr Rheum 38:531-37. Diagnostic nucleotide sets are identified that monitor and predict disease progression including flaring (acute worsening of disease accompanied by joint pain or other symptoms), response to drug treatment and likelihood of side-effects.

[0272] In addition to peripheral leukocytes, surgical specimens of rheumatoid joints can be used for leukocyte expression profiling experiments. Members of diagnostic nucleotide sets are candidates for leukocyte target nucleotide sequences, e.g. as a candidate drug target for rheumatoid arthritis.

[0273] Systemic Lupus Erythematosis (SLE)

[0274] SLE is a chronic, systemic inflammatory disease characterized by dysregulation of the immune system, which effects up to 2 million patients in the US. Symptoms of SLE include rashes, joint pain, abnormal blood counts, renal dysfunction and damage, infections, CNS disorders, arthralgias and autoimmunity. Patients may also have early onset atherosclerosis.

[0275] Diagnostic nucleotide sets are identified and validated for use in diagnosis and monitoring of SLE activity and progression. Disease criteria correspond to clinical data, e.g. symptom rash, joint pain, malaise, rashes, blood counts (white and red), tests of renal function e.g. creatinine, blood urea nitrogen (hereinafter, “bun”) creative clearance, data obtained from laboratory tests including complete blood counts with differentials, CRP, ESR, ANA, Serum IL6, Soluble CD40 ligand, LDL, HDL, Anti-DNA antibodies, rheumatoid factor, C3, C4, serum creatinine and any medication levels, the need for pain medications, cumulative doses or immunosuppressive therapy, symptoms or any manifestation of carotid atherosclerosis (e.g. ultrasound diagnosis or any other manifestations of the disease), data from surgical procedures such as gross operative findings and pathological evaluation of resected tissues and biopsies (e.g., renal, CNS), information on pharmacological therapy and treatment changes, clinical diagnoses of disease “flare”, hospitalizations, death, quantitative joint exams, results from health assessment questionnaires (HAQs), and other clinical measures of patient symptoms and disability. In addition, disease criteria correspond to the clinical score known as SLEDAI (Bombadier C, Gladman DD, Urowitz MB, Caron D, Chang CH and the Committee on Prognosis Studies in SLE: Derivation of the SLEDAI for Lupus Patients. Arthritis Rheum 35:630-640, 1992.). Diagnostic nucleotide sets may be useful for diagnosis of SLE, monitoring disease progression including progressive renal dysfunction, carotid atherosclerosis and CNS dysfunction, and predicting occurrence of side-effects, for example.

[0276] Dermatomyositis/Polymyositis

[0277] Dermatomyositis/Polymyositis is an autoimmune/inflammatory disease of muscle and skin. Disease criteria correspond to clinical markers of muscle damage (e.g. creatine kinase or myoglobin), muscle strength, symptoms, skin rash or muscle biopsy results.

[0278] Diabetes

[0279] Insulin dependent (type I) diabetes is caused by an autoimmune attack of insulin producing cells in the pancreas. The disease does not manifest until greater than 90% of the insulin producing cells are destroyed. Diagnostic nucleotide sets are developed and validated for use in detecting diabetes before it is clinically evident. Disease criteria correspond to future occurrence of diabetes, glucose tolerance, serum glucose level, and levels of hemoglobin A1c or other markers.

[0280] Inflammatory Bowel Disease (Crohn's and Ulcerative Colitis)

[0281] Inflammatory Bowel Disease, e.g., Crohn's Disease and Ulcerative Colitis, are chronic inflammatory diseases of the intestine. Together they effect at least 1 million in the US. Currently, diagnosis and monitoring is accomplished by intestinal endoscopy with or without a biopsy. Steroids and other immune suppressing drugs are useful in treating these diseases, but these drugs cause toxicity and severe side-effects. Diagnostic nucleotide sets are developed for use in diagnosis and monitoring of disease progression. Disease criteria correspond to clinical criteria, e.g. symptoms of abdominal or pelvic pain, diarrhea, fever and rectal bleeding. Alternatively, or in addition, disease criteria correspond to endoscopy results or bowel biopsy results.

[0282] Osteoarthritis

[0283] 20-40 million patients in the US have osteoarthritis. Patient groups are heterogeneous, with a subset of patients having earlier onset, more aggressive joint damage, involving more inflammation (leukocyte infiltration) leukocyte diagnostics can be used to distinguish osteoarthritis from rheumatoid arthritis, define likelihood and degree of response to NSAID therapy (non-steroidal anti-inflammatory drugs). Rate of progression of joint damage can also be assessed. Diagnostic nucleotide sets may be developed for use in selection and titration of treatment therapies. Disease criteria correspond to response to therapy, and disease progression using certain therapies, need for joint surgery, joint pain and disability.

[0284] Asthma

[0285] Asthma is a chronic inflammatory disease of the lungs. Clinical symptoms include chronic or acute airflow obstruction. Patients are treated with inhaled steroids or bronchodilators or systemic steroids and other medication, and disease progression is monitored clinically using a peak air flow meter or formal pulmonary function tests. Even with these tests, it is difficult to predict which patients are at highest risk for acute worsening of airway obstruction (an “asthma attack”). Diagnostic nucleotide sets are developed for use in predicting likelihood of acute asthma attacks, and for use in choosing and titrating drug therapy. Disease criteria correspond to pulmonary function testing, peak flow meter measurements, ER visits, inhaler use, subjective patient assessment of response to therapy, hospitalization and need for steroids.

[0286] Other Inflammatory Diseases:

[0287] Other inflammatory disease suitable for development and use of diagnostic nucleotide sets are polymyalgia rheumatica, temporal arteritis, polyarteritis nodosa, wegener's granulomatosis, whipple's disease, heterotopic ossification, Periprosthetic Osteolysis, Sepsis/ARDS, scleroderma, Grave's disease, Hashimoto's thyroiditis, psoriasis numerous others (See Table 1).

[0288] Viral Diseases

[0289] Diagnostic leukocyte nucleotide sets may be developed and validated for use in diagnosing viral disease. In another aspect, viral nucleotide sequences may be added to a leukocyte nucleotide set for use in diagnosis of viral diseases. Alternatively, viral nucleotide sets and leukocyte nucleotides sets may be used sequentially.

[0290] Epstein-Barr Virus (EBV)

[0291] EBV causes a variety of diseases such as mononucleosis, B-cell lymphoma, and pharyngeal carcinoma. It infects mononuclear cells and circulating atypical lymphocytes are a common manifestation of infection. Peripheral leukocyte gene expression is altered by infection. Transplant recipients and patients who are immunosuppressed are at increased risk for EBV-associated lymphoma.

[0292] Diagnostic nucleotide sets may be developed and validated for use in diagnosis and monitoring of EBV. In one aspect, the diagnostic nucleotide set is a leukocyte nucleotide set. Alternatively, EBV nucleotide sequences are added to a leukocyte nucleotide set, for use in diagnosing EBV. Disease criteria correspond with diagnosis of EBV, and, in patients who are EBV-sero-positive, presence (or prospective occurrence) of EBV-related illnesses such as mononucleosis, and EBV-associated lymphoma. Diagnostic nucleotide sets are useful for diagnosis of EBV, and prediction of occurrence of EBV-related illnesses.

[0293] Cytomegalovirus (CMV)

[0294] Cytomegalovirus cause inflammation and disease in almost any tissue, particularly the colon, lung, bone marrow and retina, and is a very important cause of disease in immunosuppressed patients, e.g. transplant, cancer, AIDS. Many patients are infected with or have been exposed to CMV, but not all patients develop clinical disease from the virus. Also, CMV negative recipients of allografts that come from CMV positive donors are at high risk for CMV infection. As immunosuppressive drugs are developed and used, it is increasingly important to identify patients with current or impending clinical CMV disease, because the potential benefit of immunosuppressive therapy must be balanced with the increased rate of clinical CMV infection and disease that may result from the use of immunosuppression therapy. CMV may also play a role in the occurrence of atherosclerosis or restenosis after angioplasty.

[0295] Diagnostic nucleotide sets are developed for use in diagnosis and monitoring of CMV infection or re-activation of CMV infection. In one aspect, the diagnostic nucleotide set is a leukocyte nucleotide set. In another aspect, CMV nucleotide sequences are added to a leukocyte nucleotide set, for use in diagnosing CMV. Disease criteria correspond to diagnosis of CMV (e.g., sero-positive state) and presence of clinically active CMV. Disease criteria may also correspond to prospective data, e.g. the likelihood that CMV will become clinically active or impending clinical CMV infection. Antiviral medications are available and diagnostic nucleotide sets can be used to select patients for early treatment, chronic suppression or prophylaxis of CMV activity.

[0296] Hepatitis B and C

[0297] These chronic viral infections affect about 1.25 and 2.7 million patients in the US, respectively. Many patients are infected, but suffer no clinical manifestations. Some patients with infection go on to suffer from chronic liver failure, cirrhosis and hepatic carcinoma.

[0298] Diagnostic nucleotide sets are developed for use in diagnosis and monitoring of HBV or HCV infection. In one aspect, the diagnostic nucleotide set is a leukocyte nucleotide set. In another aspect, viral nucleotide sequences are added to a leukocyte nucleotide set, for use in diagnosing the virus and monitoring progression of liver disease. Disease criteria correspond to diagnosis of the virus (e.g., sero-positive state or other disease symptoms). Alternatively, disease criteria correspond to liver damage, e.g., elevated alkaline phosphatase, ALT, AST or evidence of ongoing hepatic damage on liver biopsy. Alternatively, disease criteria correspond to serum liver tests (AST, ALT, Alkaline Phosphatase, GGT, PT, bilirubin), liver biopsy, liver ultrasound, viral load by serum PCR, cirrhosis, hepatic cancer, need for hospitalization or listing for liver transplant. Diagnostic nucleotide sets are used to diagnose HBV and HCV, and to predict likelihood of disease progression. Antiviral therapeutic usage, such as Interferon gamma and Ribavirin, can also be disease criteria.

[0299] HIV

[0300] HIV infects T cells and certainly causes alterations in leukocyte expression. Diagnostic nucleotide sets are developed for diagnosis and monitoring of HIV. In one aspect, the diagnostic nucleotide set is a leukocyte nucleotide set. In another aspect, viral nucleotide sequences are added to a leukocyte nucleotide set, for use in diagnosing the virus. Disease criteria correspond to diagnosis of the virus (e.g., sero-positive state). In addition, disease criteria correspond to viral load, CD4 T cell counts, opportunistic infection, response to antiretroviral therapy, progression to AIDS, rate of progression and the occurrence of other HIV related outcomes (e.g., malignancy, CNS disturbance). Response to antiretrovirals may also be disease criteria.

[0301] Pharmacogenomics

[0302] Pharmocogenomics is the study of the individual propensity to respond to a particular drug therapy (combination of therapies). In this context, response can mean whether a particular drug will work on a particular patient, e.g. some patients respond to one drug but not to another drug. Response can also refer to the likelihood of successful treatment or the assessment of progress in treatment. Titration of drug therapy to a particular patient is also included in this description, e.g. different patients can respond to different doses of a given medication. This aspect may be important when drugs with side-effects or interactions with other drug therapies are contemplated.

[0303] Diagnostic nucleotide sets are developed and validated for use in assessing whether a patient will respond to a particular therapy and/or monitoring response of a patient to drug therapy(therapies). Disease criteria correspond to presence or absence of clinical symptoms or clinical endpoints, presence of side-effects or interaction with other drug(s). The diagnostic nucleotide set may further comprise nucleotide sequences that are targets of drug treatment or markers of active disease.

[0304] Validation and Accuracy of Diagnostic Nucleotide Set Using Correlation Analysis

[0305] Prior to widespread application of the diagnostic probe sets of the invention, the predictive value of the probe set is validated.

[0306] Typically, the oligonucleotide sequence of each probe is confirmed, e.g. by DNA sequencing using an oligonucleotide-specific primer. Partial sequence obtained is generally sufficient to confirm the identity of the oligonucleotide probe. Alternatively, a complementary polynucleotide is fluorescently labeled and hybridized to the array, or to a different array containing a resynthesized version of the oligo nucleotide probe, and detection of the correct probe is confirmed.

[0307] Typically, validation is performed by statistically evaluating the accuracy of the correspondence between the molecular signature for a diagnostic probe set and a selected indicator. For example, the expression differential for a nucleotide sequence between two subject classes can be expressed as a simple ratio of relative expression. The expression of the nucleotide sequence in subjects with selected indicator can be compared to the expression of that nucleotide sequence in subjects without the indicator, as described in the following equations.

[0308] ΣEₓai/N=EₓA the average expression of nucleotide sequence x in the members of group A;

[0309] ΣEₓbi/M=EₓB the average expression of nucleotide sequence x in the members of group B;

[0310] EₓA/ExB=ΔEₓAB the average differential expression of nucleotide sequence x between groups A

[0311] and B:

[0312] where Σ indicates a sum; Ex is the expression of nucleotide sequence x relative to a standard; ai are the individual members of group A, group A has N members; bi are the individual members of group B, group B has M members.

[0313] The expression of at least two nucleotide sequences, e.g., nucleotide sequence X and nucleotide sequence Y are measured relative to a standard in at least one subject of group A (e.g., with a disease) and group B (e.g., without the disease). Ideally, for purposes of validation the indicator is independent from (i.e., not assigned based upon) the expression pattern. Alternatively, a minimum threshold of gene expression for nucleotide sequences X and Y, relative to the standard, are designated for assignment to group A. For nucleotide sequence x, this threshold is designated ΔEx, and for nucleotide sequence y, the threshold is designated ΔEy.

[0314] The following formulas are used in the calculations below:
Sensitivity=(true positives/true positives+false negatives)
Specificity=(true negatives/true negatives+false positives)

[0315] If, for example, expression of nucleotide sequence x above a threshold: x>ΔEx, is observed for 80/100 subjects in group A and for 10/100 subjects in group B, the sensitivity of nucleotide sequence x for the assignment to group A, at the given expression threshold ΔEx, is 80%, and the specificity is 90%.

[0316] If the expression of nucleotide sequence y is >ΔEy in 80/100 subjects in group A, and in 10/100 subjects in group B, then, similarly the sensitivity of nucleotide sequence y for the assignment to group A at the given threshold ΔEy is 80% and the specificity is 90%. If in addition, 60 of the 80 subjects in group A that meet the expression threshold for nucleotide sequence y also meet the expression threshold ΔEx and that 5 of the 10 subjects in group B that meet the expression threshold for nucleotide sequence y also meet the expression threshold ΔEx, the sensitivity of the test (x>ΔEx and y>□ΔEy) for assignment of subjects to group A is 60% and the specificity is 95%.

[0317] Alternatively, if the criteria for assignment to group A are change to: Expression of x>ΔEx or expression of y>ΔEy, the sensitivity approaches 100% and the specificity is 85%.

[0318] Clearly, the predictive accuracy of any diagnostic probe set is dependent on the minimum expression threshold selected. The expression of nucleotide sequence X (relative to a standard) is measured in subjects of groups A (with disease) and B (without disease). The minimum threshold of nucleotide sequence expression for x, required for assignment to group A is designated ΔEx 1.

[0319] If 90/100 patients in group A have expression of nucleotide sequence x>ΔEx 1 and 20/100 patients in group B have expression of nucleotide sequence x>ΔEx 1, then the sensitivity of the expression of nucleotide sequence x (using ΔEx 1 as a minimum expression threshold) for assignment of patients to group A will be 90% and the specificity will be 80%.

[0320] Altering the minimum expression threshold results in an alteration in the specificity and sensitivity of the nucleotide sequences in question. For example, if the minimum expression threshold of nucleotide sequence x for assignment of subjects to group A is lowered to ΔEx 2, such that 100/100 subjects in group A and 40/100 subjects in group B meet the threshold, then the sensitivity of the test for assignment of subjects to group A will be 100% and the specificity will be 60%.

[0321] Thus, for 2 nucleotide sequences X and Y: the expression of nucleotide sequence x and nucleotide sequence y (relative to a standard) are measured in subjects belonging to groups A (with disease) and B (without disease). Minimum thresholds of nucleotide sequence expression for nucleotide sequences X and Y (relative to common standards) are designated for assignment to group A. For nucleotide sequence x, this threshold is designated ΔEx1 and for nucleotide sequence y, this threshold is designated ΔEy1.

[0322] If in group A, 90/100 patients meet the minimum requirements of expression ΔEx1 and ΔEy1, and in group B, 10/100 subjects meet the minimum requirements of expression ΔEx1 and ΔEy1, then the sensitivity of the test for assignment of subjects to group A is 90% and the specificity is 90%.

[0323] Increasing the minimum expression thresholds for X and Y to ΔEx2 and ΔEy2, such that in group A, 70/100 subjects meet the minimum requirements of expression ΔEx2 and ΔEy2, and in group B, 3/100 subjects meet the minimum requirements of expression ΔEx2 and ΔEy2. Now the sensitivity of the test for assignment of subjects to group A is 70% and the specificity is 97%.

[0324] If the criteria for assignment to group A is that the subject in question meets either threshold, ΔEx2 or ΔEy2, and it is found that 100/100 subjects in group A meet the criteria and 20/100 subjects in group B meet the criteria, then the sensitivity of the test for assignment to group A is 100% and the specificity is 80%.

[0325] Individual components of a diagnostic probe set each have a defined sensitivity and specificity for distinguishing between subject groups. Such individual nucleotide sequences can be employed in concert as a diagnostic probe set to increase the sensitivity and specificity of the evaluation. The database of molecular signatures is queried by algorithms to identify the set of nucleotide sequences (i.e., corresponding to members of the probe set) with the highest average differential expression between subject groups. Typically, as the number of nucleotide sequences in the diagnostic probe set increases, so does the predictive value, that is, the sensitivity and specificity of the probe set. When the probe sets are defined they may be used for diagnosis and patient monitoring as discussed below. The diagnostic sensitivity and specificity of the probe sets for the defined use can be determined for a given probe set with specified expression levels as demonstrated above. By altering the expression threshold required for the use of each nucleotide sequence as a diagnostic, the sensitivity and specificity of the probe set can be altered by the practitioner. For example, by lowering the magnitude of the expression differential threshold for each nucleotide sequence in the set, the sensitivity of the test will increase, but the specificity will decrease. As is apparent from the foregoing discussion, sensitivity and specificity are inversely related and the predictive accuracy of the probe set is continuous and dependent on the expression threshold set for each nucleotide sequence. Although sensitivity and specificity tend to have an inverse relationship when expression thresholds are altered, both parameters can be increased as nucleotide sequences with predictive value are added to the diagnostic nucleotide set. In addition a single or a few markers may not be reliable expression markers across a population of patients. This is because of the variability in expression and measurement of expression that exists between measurements, individuals and individuals over time. Inclusion of a large number of candidate nucleotide sequences or large numbers of nucleotide sequences in a diagnostic nucleotide set allows for this variability as not all nucleotide sequences need to meet a threshold for diagnosis. Generally, more markers are better than a single marker. If many markers are used to make a diagnosis, the likelihood that all expression markers will not meet some thresholds based upon random variability is low and thus the test will give fewer false negatives.

[0326] It is appreciated that the desired diagnostic sensitivity and specificity of the diagnostic nucleotide set may vary depending on the intended use of the set. For example, in certain uses, high specificity and high sensitivity are desired. For example, a diagnostic nucleotide set for predicting which patient population may experience side effects may require high sensitivity so as to avoid treating such patients. In other settings, high sensitivity is desired, while reduced specificity may be tolerated. For example, in the case of a beneficial treatment with few side effects, it may be important to identify as many patients as possible (high sensitivity) who will respond to the drug, and treatment of some patients who will not respond is tolerated. In other settings, high specificity is desired and reduced sensitivity may be tolerated. For example, when identifying patients for an early-phase clinical trial, it is important to identify patients who may respond to the particular treatment. Lower sensitivity is tolerated in this setting as it merely results in reduced patients who enroll in the study or requires that more patients are screened for enrollment.

[0327] Methods of Using Diagnostic Nucleotide Sets.

[0328] The invention also provide methods of using the diagnostic nucleotide sets to: diagnose disease; assess severity of disease; predict future occurrence of disease; predict future complications of disease; determine disease prognosis; evaluate the patient's risk, or “stratify” a group of patients; assess response to current drug therapy; assess response to current non-pharmacological therapy; determine the most appropriate medication or treatment for the patient; predict whether a patient is likely to respond to a particular drug; and determine most appropriate additional diagnostic testing for the patient, among other clinically and epidemiologically relevant applications.

[0329] The nucleotide sets of the invention can be utilized for a variety of purposes by physicians, healthcare workers, hospitals, laboratories, patients, companies and other institutions. As indicated previously, essentially any disease, condition, or status for which at least one nucleotide sequence is differentially expressed in leukocyte populations (or sub-populations) can be evaluated, e.g., diagnosed, monitored, etc. using the diagnostic nucleotide sets and methods of the invention. In addition to assessing health status at an individual level, the diagnostic nucleotide sets of the present invention are suitable for evaluating subjects at a “population level,” e.g., for epidemiological studies, or for population screening for a condition or disease.

[0330] Collection and Preparation of Sample

[0331] RNA, protein and/or DNA is prepared using methods well-known in the art, as further described herein. It is appreciated that subject samples collected for use in the methods of the invention are generally collected in a clinical setting, where delays may be introduced before RNA samples are prepared from the subject samples of whole blood, e.g. the blood sample may not be promptly delivered to the clinical lab for further processing. Further delay may be introduced in the clinical lab setting where multiple samples are generally being processed at any given time. For this reason, methods which feature lengthy incubations of intact leukocytes at room temperature are not preferred, because the expression profile of the leukocytes may change during this extended time period. For example, RNA can be isolated from whole blood using a phenol/guanidine isothiocyanate reagent or another direct whole-blood lysis method, as described in, e.g., U.S. Pat. Nos. 5,346,994 and 4,843,155. This method may be less preferred under certain circumstances because the large majority of the RNA recovered from whole blood RNA extraction comes from erythrocytes since these cells outnumber leukocytes 1000:1. Care must be taken to ensure that the presence of erythrocyte RNA and protein does not introduce bias in the RNA expression profile data or lead to inadequate sensitivity or specificity of probes.

[0332] Alternatively, intact leukocytes may be collected from whole blood using a lysis buffer that selectively lyses erythrocytes, but not leukocytes, as described, e.g., in (U.S. Pat. Nos. 5,973,137, and 6,020,186). Intact leukocytes are then collected by centrifugation, and leukocyte RNA is isolated using standard protocols, as described herein. However, this method does not allow isolation of sub-populations of leukocytes, e.g. mononuclear cells, which may be desired. In addition, the expression profile may change during the lengthy incubation in lysis buffer, especially in a busy clinical lab where large numbers of samples are being prepared at any given time.

[0333] Alternatively, specific leukocyte cell types can be separated using density gradient reagents (Boyum, A, 1968.). For example, mononuclear cells may be separated from whole blood using density gradient centrifugation, as described, e.g., in U.S. Pat. Nos. 4,190,535, 4,350,593, 4751001, 4818418, and 5053134. Blood is drawn directly into a tube containing an anticoagulant and a density reagent (such as Ficoll or Percoll). Centrifugation of this tube results in separation of blood into an erythrocyte and granulocyte layer, a mononuclear cell suspension, and a plasma layer. The mononuclear cell layer is easily removed and the cells can be collected by centrifugation, lysed, and frozen. Frozen samples are stable until RNA can be isolated. Density centrifugation, however, must be conducted at room temperature, and if processing is unduly lengthy, such as in a busy clinical lab, the expression profile may change.

[0334] The quality and quantity of each clinical RNA sample is desirably checked before amplification and labeling for array hybridization, using methods known in the art. For example, one microliter of each sample may be analyzed on a Bioanalyzer (Agilent 2100 Palo Alto, Calif. USA) using an RNA 6000 nano LabChip (Caliper, Mountain View, Calif. USA). Degraded RNA is identified by the reduction of the 28S to 18S ribosomal RNA ratio and/or the presence of large quantities of RNA in the 25-100 nucleotide range.

[0335] It is appreciated that the RNA sample for use with a diagnostic nucleotide set may be produced from the same or a different cell population, sub-population and/or cell type as used to identify the diagnostic nucleotide set. For example, a diagnostic nucleotide set identified using RNA extracted from mononuclear cells may be suitable for analysis of RNA extracted from whole blood or mononuclear cells, depending on the particular characteristics of the members of the diagnostic nucleotide set. Generally, diagnostic nucleotide sets must be tested and validated when used with RNA derived from a different cell population, sub-population or cell type than that used when obtaining the diagnostic gene set. Factors such as the cell-specific gene expression of diagnostic nucleotide set members, redundancy of the information provided by members of the diagnostic nucleotide set, expression level of the member of the diagnostic nucleotide set, and cell-specific alteration of expression of a member of the diagnostic nucleotide set will contribute to the usefullness of using a different RNA source than that used when identifying the members of the diagnostic nucleotide set. It is appreciated that it may be desirable to assay RNA derived from whole blood, obviating the need to isolate particular cell types from the blood.

Rapid Method of RNA Extraction Suitable for Production in a Clinical Setting of High Quality RNA for Expression Profiling

[0336] In a clinical setting, obtaining high quality RNA preparations suitable for expression profiling, from a desired population of leukocytes poses certain technical challenges, including: the lack of capacity for rapid, high-throughput sample processing in the clinical setting, and the possibility that delay in processing (in a busy lab or in the clinical setting) may adversely affect RNA quality, e.g. by a permitting the expression profile of certain nucleotide sequences to shift. Also, use of toxic and expensive reagents, such as phenol, may be disfavored in the clinical setting due to the added expense associated with shipping and handling such reagents.

[0337] A useful method for RNA isolation for leukocyte expression profiling would allow the isolation of monocyte and lymphocyte RNA in a timely manner, while preserving the expression profiles of the cells, and allowing inexpensive production of reproducible high-quality RNA samples. Accordingly, the invention provides a method of adding inhibitor(s) of RNA transcription and/or inhibitor(s) of protein synthesis, such that the expression profile is “frozen” and RNA degradation is reduced. A desired leukocyte population or sub-population is then isolated, and the sample may be frozen or lysed before further processing to extract the RNA. Blood is drawn from subject population and exposed to ActinomycinD (to a final concentration of 10 ug/ml) to inhibit transcription, and cycloheximide (to a final concentration of 10 ug/ml) to inhibit protein synthesis. The inhibitor(s) can be injected into the blood collection tube in liquid form as soon as the blood is drawn, or the tube can be manufactured to contain either lyophilized inhibitors or inhibitors that are in solution with the anticoagulant. At this point, the blood sample can be stored at room temperature until the desired leukocyte population or sub-population is isolated, as described elsewhere. RNA is isolated using standard methods, e.g., as described above, or a cell pellet or extract can be frozen until further processing of RNA is convenient.

[0338] The invention also provides a method of using a low-temperature density gradient for separation of a desired leukocyte sample. In another embodiment, the invention provides the combination of use of a low-temperature density gradient and the use of transcriptional and/or protein synthesis inhibitor(s). A desired leukocyte population is separated using a density gradient solution for cell separation that maintains the required density and viscosity for cell separation at 0-4° C. Blood is drawn into a tube containing this solution and may be refrigerated before and during processing as the low temperatures slow cellular processes and minimize expression profile changes. Leukocytes are separated, and RNA is isolated using standard methods. Alternately, a cell pellet or extract is frozen until further processing of RNA is convenient. Care must be taken to avoid rewarming the sample during further processing steps.

[0339] Alternatively, the invention provides a method of using low-temperature density gradient separation, combined with the use of actinomycin A and cyclohexamide, as described above.

[0340] Assessing Expression for Diagnostics

[0341] Expression profiles for the set of diagnostic nucleotide sequences in a subject sample can be evaluated by any technique that determines the expression of each component nucleotide sequence. Methods suitable for expression analysis are known in the art, and numerous examples are discussed in the Sections titled “Methods of obtaining expression data” and “high throughput expression Assays”, above.

[0342] In many cases, evaluation of expression profiles is most efficiently, and cost effectively, performed by analyzing RNA expression. Alternatively, the proteins encoded by each component of the diagnostic nucleotide set are detected for diagnostic purposes by any technique capable of determining protein expression, e.g., as described above. Expression profiles can be assessed in subject leukocyte sample using the same or different techniques as those used to identify and validate the diagnostic nucleotide set. For example, a diagnostic nucleotide set identified as a subset of sequences on a cDNA microarray can be utilized for diagnostic (or prognostic, or monitoring, etc.) purposes on the same array from which they were identified. Alternatively, the diagnostic nucleotide sets for a given disease or condition can be organized onto a dedicated sub-array for the indicated purpose. It is important to note that if diagnostic nucleotide sets are discovered using one technology, e.g. RNA expression profiling, but applied as a diagnostic using another technology, e.g. protein expression profiling, the nucleotide sets must generally be validated for diagnostic purposes with the new technology. In addition, it is appreciated that diagnostic nucleotide sets that are developed for one use, e.g. to diagnose a particular disease, may later be found to be useful for a different application, e.g. to predict the likelihood that the particular disease will occur. Generally, the diagnostic nucleotide set will need to be validated for use in the second circumstance. As discussed herein, the sequence of diagnostic nucleotide set members may be amplified from RNA or cDNA using methods known in the art providing specific amplification of the nucleotide sequences.

[0343] Identification of Novel Nucleotide Sequences that are Differentially Expressed in Leukocytes

[0344] Novel nucleotide sequences that are differentially expressed in leukocytes are also part of the invention. Previously unidentified open reading frames may be identified in a library of differentially expressed candidate nucleotide sequences, as described above, and the DNA and predicted protein sequence may be identified and characterized as noted above. We identified unnamed (not previously described as corresponding to a gene, or an expressed gene) nucleotide sequences in the our candidate nucleotide library, depicted in Table 3A, 3B and the sequence listing. Accordingly, further embodiments of the invention are the isolated nucleic acids described in Tables 3A and 3B, and in the sequence listing. The novel differentially expressed nucleotide sequences of the invention are useful in the diagnostic nucleotide set of the invention described above, and are further useful as members of a diagnostic nucleotide set immobilized on an array. The novel partial nucleotide sequences may be further characterized using sequence tools and publically or privately accessible sequence databases, as is well known in the art: Novel differentially expressed nucleotide sequences may be identified as disease target nucleotide sequences, described below. Novel nucleotide sequences may also be used as imaging reagent, as further described below.

[0345] As used herein, “novel nucleotide sequence” refers to (a) a nucleotide sequence containing at least one of the DNA sequences disclosed herein (as shown in FIGS. Table 3A, 3B and the sequence listing); (b) any DNA sequence that encodes the amino acid sequence encoded by the DNA sequences disclosed herein; (c) any DNA sequence that hybridizes to the complement of the coding sequences disclosed herein, contained within the coding region of the nucleotide sequence to which the DNA sequences disclosed herein (as shown in Table 3A, 3B and the sequence listing) belong, under highly stringent conditions, e.g., hybridization to filter-bound DNA in 0.5 M NaHPO₄, 7% sodium dodecyl sulfate (SDS), 1 mM EDTA at 65° C., and washing in 0.1×SSC/0.1% SDS at 68° C. (Ausubel F. M. et al., eds., 1989, Current Protocols in Molecular Biology, Vol. I, Green Publishing Associates, Inc., and John Wiley & sons, Inc., New York, at p. 2.10.3), (d) any DNA sequence that hybridizes to the complement of the coding sequences disclosed herein, (as shown in Table 3A, 3B and the sequence listing) contained within the coding region of the nucleotide sequence to which DNA sequences disclosed herein (as shown in TABLES 3A, 3B and the sequence listing) belong, under less stringent conditions, such as moderately stringent conditions, e.g., washing in 0.2×SSC/0.1% SDS at 42° C. (Ausubel et al., 1989, supra), yet which still encodes a functionally equivalent gene product; and/or (e) any DNA sequence that is at least 90% identical, at least 80% identical or at least 70% identical to the coding sequences disclosed herein (as shown in TABLES 3A, 3B and the sequence listing), wherein % identity is determined using standard algorithms known in the art.

[0346] The invention also includes nucleic acid molecules, preferably DNA molecules, that hybridize to, and are therefore the complements of, the DNA sequences (a) through (c), in the preceding paragraph. Such hybridization conditions may be highly stringent or less highly stringent, as described above. In instances wherein the nucleic acid molecules are deoxyoligonucleotides (“oligos”), highly stringent conditions may refer, e.g., to washing in 6×SSC/0.05% sodium pyrophosphate at 37° C. (for 14-base oligos), 48° C. (for 17-base oligos), 55° C. (for 20-base oligos), and 60° C. (for 23-base oligos). These nucleic acid molecules may act as target nucleotide sequence antisense molecules, useful, for example, in target nucleotide sequence regulation and/or as antisense primers in amplification reactions of target nucleotide sequence nucleic acid sequences. Further, such sequences may be used as part of ribozyme and/or triple helix sequences, also useful for target nucleotide sequence regulation. Still further, such molecules may be used as components of diagnostic methods whereby the presence of a disease-causing allele, may be detected.

[0347] The invention also encompasses (a) DNA vectors that contain any of the foregoing coding sequences and/or their complements (i.e., antisense); (b) DNA expression vectors that contain any of the foregoing coding sequences operatively associated with a regulatory element that directs the expression of the coding sequences; and (c) genetically engineered host cells that contain any of the foregoing coding sequences operatively associated with a regulatory element that directs the expression of the coding sequences in the host cell. As used herein, regulatory elements include but are not limited to inducible and non-inducible promoters, enhancers, operators and other elements known to those skilled in the art that drive and regulate expression. The invention includes fragments of any of the DNA sequences disclosed herein. Fragments of the DNA sequences may be at least 5, at least 10, at least 15, at least 19 nucleotides, at least 25 nucleotides, at least 50 nucleotides, at least 100 nucleotides, at least 200, at least 500, or larger.

[0348] In addition to the nucleotide sequences described above, homologues of such sequences, as may, for example be present in other species, may be identified and may be readily isolated, without undue experimentation, by molecular biological techniques well known in the art, as well as use of gene analysis tools described above, and e.g., in Example 4. Further, there may exist nucleotide sequences at other genetic loci within the genome that encode proteins which have extensive homology to one or more domains of such gene products. These nucleotide sequences may also be identified via similar techniques.

[0349] For example, the isolated differentially expressed nucleotide sequence may be labeled and used to screen a cDNA library constructed from mRNA obtained from the organism of interest. Hybridization conditions will be of a lower stringency when the cDNA library was derived from an organism different from the type of organism from which the labeled sequence was derived. Alternatively, the labeled fragment may be used to screen a genomic library derived from the organism of interest, again, using appropriately stringent conditions. Such low stringency conditions will be well known to those of skill in the art, and will vary predictably depending on the specific organisms from which the library and the labeled sequences are derived. For guidance regarding such conditions see, for example, Sambrook et al., 1989, Molecular Cloning, A Laboratory Manual, Cold Springs Harbor Press, N.Y.; and Ausubel et al., 1989, Current Protocols in Molecular Biology, Green Publishing Associates and Wiley Interscience, N.Y.

[0350] Novel nucleotide products include those proteins encoded by the novel nucleotide sequences described, above. Specifically, novel gene products may include polypeptides encoded by the novel nucleotide sequences contained in the coding regions of the nucleotide sequences to which DNA sequences disclosed herein (in TABLES 3A, 3B and the sequence listing).

[0351] In addition, novel protein products of novel nucleotide sequences may include proteins that represent functionally equivalent gene products. Such an equivalent novel gene product may contain deletions, additions or substitutions of amino acid residues within the amino acid sequence encoded by the novel nucleotide sequences described, above, but which result in a silent change, thus producing a functionally equivalent novel nucleotide sequence product. Amino acid substitutions may be made on the basis of similarity in polarity, charge, solubility, hydrophobicity, hydrophilicity, and/or the amphipathic nature of the residues involved.

[0352] For example, nonpolar (hydrophobic) amino acids include alanine, leucine, isoleucine, valine, proline, phenylalanine, tryptophan, and methionine; polar neutral amino acids include glycine, serine, threonine, cysteine, tyrosine, asparagine, and glutamine; positively charged (basic) amino acids include arginine, lysine, and histidine; and negatively charged (acidic) amino acids include aspartic acid and glutamic acid. “Functionally equivalent”, as utilized herein, refers to a protein capable of exhibiting a substantially similar in vivo activity as the endogenous novel gene products encoded by the novel nucleotide described, above.

[0353] The novel gene products (protein products of the novel nucleotide sequences) may be produced by recombinant DNA technology using techniques well known in the art. Thus, methods for preparing the novel gene polypeptides and peptides of the invention by expressing nucleic acid encoding novel nucleotide sequences are described herein. Methods which are well known to those skilled in the art can be used to construct expression vectors containing novel nucleotide sequence protein coding sequences and appropriate transcriptional/translational control signals. These methods include, for example, in vitro recombinant DNA techniques, synthetic techniques and in vivo recombination/genetic recombination. See, for example, the techniques described in Sambrook et al., 1989, supra, and Ausubel et al., 1989, supra. Alternatively, RNA capable of encoding novel nucleotide sequence protein sequences may be chemically synthesized using, for example, synthesizers. See, for example, the techniques described in “Oligonucleotide Synthesis”, 1984, Gait, M. J. ed., IRL Press, Oxford, which is incorporated by reference herein in its entirety

[0354] A variety of host-expression vector systems may be utilized to express the novel nucleotide sequence coding sequences of the invention. Such host-expression systems represent vehicles by which the coding sequences of interest may be produced and subsequently purified, but also represent cells which may, when transformed or transfected with the appropriate nucleotide coding sequences, exhibit the novel protein encoded by the novel nucleotide sequence of the invention in situ. These include but are not limited to microorganisms such as bacteria (e.g., E. coli, B. subtilis) transformed with recombinant bacteriophage DNA, plasmid DNA or cosmid DNA expression vectors containing novel nucleotide sequence protein coding sequences; yeast (e.g. Saccharomyces, Pichia) transformed with recombinant yeast expression vectors containing the novel nucleotide sequence protein coding sequences; insect cell systems infected with recombinant virus expression vectors (e.g., baculovirus) containing the novel nucleotide sequence protein coding sequences; plant cell systems infected with recombinant virus expression vectors (e.g., cauliflower mosaic virus, CaMV; tobacco mosaic virus, TMV) or transformed with recombinant plasmid expression vectors (e.g., Ti plasmid) containing novel nucleotide sequence protein coding sequences; or mammalian cell systems (e.g. COS, CHO, BHK, 293, 3T3) harboring recombinant expression constructs containing promoters derived from the genome of mammalian cells (e.g., metallothionein promoter) or from mammalian viruses (e.g., the adenovirus late promoter; the vaccinia virus 7.5 K promoter).

[0355] In bacterial systems, a number of expression vectors may be advantageously selected depending upon the use intended for the novel nucleotide sequence protein being expressed. For example, when a large quantity of such a protein is to be produced, for the generation of antibodies or to screen peptide libraries, for example, vectors which direct the expression of high levels of fusion protein products that are readily purified may be desirable. Such vectors include, but are not limited, to the E. coli expression vector pUR278 (Ruther et al., 1983, EMBO J. 2:1791), in which the novel nucleotide sequence protein coding sequence may be ligated individually into the vector in frame with the lac Z coding region so that a fusion protein is produced; pIN vectors (Inouye & Inouye, 1985, Nucleic Acids Res. 13:3101-3109; Van Heeke & Schuster, 1989, J. Biol. Chem. 264:5503-5509); and the likes of pGEX vectors may also be used to express foreign polypeptides as fusion proteins with glutathione S-transferase (GST). In general, such fusion proteins are soluble and can easily be purified from lysed cells by adsorption to glutathione-agarose beads followed by elution in the presence of free glutathione. The pGEX vectors are designed to include thrombin or factor Xa protease cleavage sites so that the cloned target nucleotide sequence protein can be released from the GST moiety. Other systems useful in the invention include use of the FLAG epitope or the 6-HIS systems.

[0356] In an insect system, Autographa californica nuclear polyhedrosis virus (AcNPV) is used as a vector to express foreign nucleotide sequences. The virus grows in Spodoptera frugiperda cells. The novel nucleotide sequence coding sequence may be cloned individually into non-essential regions (for example the polyhedrin gene) of the virus and placed under control of an AcNPV promoter (for example the polyhedrin promoter). Successful insertion of novel nucleotide sequence coding sequence will result in inactivation of the polyhedrin gene and production of non-occluded recombinant virus (i.e., virus lacking the proteinaceous coat coded for by the polyhedrin gene). These recombinant viruses are then used to infect Spodoptera frugiperda cells in which the inserted nucleotide sequence is expressed. (E.g., see Smith et al., 1983, J. Virol. 46: 584; Smith, U.S. Pat. No. 4,215,051).

[0357] In mammalian host cells, a number of viral-based expression systems may be utilized. In cases where an adenovirus is used as an expression vector, the novel nucleotide sequence coding sequence of interest may be ligated to an adenovirus transcription/translation control complex, e.g., the late promoter and tripartite leader sequence. This chimeric nucleotide sequence may then be inserted in the adenovirus genome by in vitro or in vivo recombination. Insertion in a non-essential region of the viral genome (e.g., region E1 or E3) will result in a recombinant virus that is viable and capable of expressing novel nucleotide sequence encoded protein in infected hosts. (E.g., See Logan & Shenk, 1984, Proc. Natl. Acad. Sci. USA 81:3655-3659). Specific initiation signals may also be required for efficient translation of inserted novel nucleotide sequence coding sequences. These signals include the ATG initiation codon and adjacent sequences. In cases where an entire novel nucleotide sequence, including its own initiation codon and adjacent sequences, is inserted into the appropriate expression vector, no additional translational control signals may be needed. However, in cases where only a portion of the novel nucleotide sequence coding sequence is inserted, exogenous translational control signals, including, perhaps, the ATG initiation codon, must be provided. Furthermore, the initiation codon must be in phase with the reading frame of the desired coding sequence to ensure translation of the entire insert. These exogenous translational control signals and initiation codons can be of a variety of origins, both natural and synthetic. The efficiency of expression may be enhanced by the inclusion of appropriate transcription enhancer elements, transcription terminators, etc. (see Bittner et al., 1987, Methods in Enzymol. 153:516-544).

[0358] In addition, a host cell strain may be chosen which modulates the expression of the inserted sequences, or modifies and processes the product of the nucleotide sequence in the specific fashion desired. Such modifications (e.g., glycosylation) and processing (e.g., cleavage) of protein products may be important for the function of the protein. Different host cells have characteristic and specific mechanisms for the post-translational processing and modification of proteins. Appropriate cell lines or host systems can be chosen to ensure the correct modification and processing of the foreign protein expressed. To this end, eukaryotic host cells which possess the cellular machinery for proper processing of the primary transcript, glycosylation, and phosphorylation of the gene product may be used. Such mammalian host cells include but are not limited to CHO, VERO, BHK, HeLa, COS, MDCK, 293, 3T3, WI38, etc.

[0359] For long-term, high-yield production of recombinant proteins, stable expression is preferred. For example, cell lines which stably express the novel nucleotide sequence encoded protein may be engineered. Rather than using expression vectors which contain viral origins of replication, host cells can be transformed with DNA controlled by appropriate expression control elements (e.g., promoter, enhancer, sequences, transcription terminators, polyadenylation sites, etc.), and a selectable marker. Following the introduction of the foreign DNA, engineered cells may be allowed to grow for 1-2 days in an enriched media, and then are switched to a selective media. The selectable marker in the recombinant plasmid confers resistance to the selection and allows cells to stably integrate the plasmid into their chromosomes and grow to form foci which in turn can be cloned and expanded into cell lines. This method may advantageously be used to engineer cell lines which express novel nucleotide sequence encoded protein. Such engineered cell lines may be particularly useful in screening and evaluation of compounds that affect the endogenous activity of the novel nucleotide sequence encoded protein.

[0360] A number of selection systems may be used, including but not limited to the herpes simplex virus thymidine kinase (Wigler, et al., 1977, Cell 11:223), hypoxanthine-guanine phosphoribosyltransferase (Szybalska & Szybalski, 1962, Proc. Natl. Acad. Sci. USA 48:2026), and adenine phosphoribosyltransferase (Lowy, et al., 1980, Cell 22:817) genes can be employed in tk-, hgprt- or aprt-cells, respectively. Also, antimetabolite resistance can be used as the basis of selection for dhfr, which confers resistance to methotrexate (Wigler, et al., 1980, Natl. Acad. Sci. USA 77:3567; O'Hare, et al., 1981, Proc. Natl. Acad. Sci. USA 78:1527); gpt, which confers resistance to mycophenolic acid (Mulligan & Berg, 1981, Proc. Natl. Acad. Sci. USA 78:2072); neo, which confers resistance to the aminoglycoside G-418 (Colberre-Garapin, et al., 1981, J. Mol. Biol. 150:1); and hygro, which confers resistance to hygromycin (Santerre, et al., 1984, Gene 30:147) genes.

[0361] An alternative fusion protein system allows for the ready purification of non-denatured fusion proteins expressed in human cell lines (Janknecht, et al., 1991, Proc. Natl. Acad. Sci. USA 88: 8972-8976). In this system, the nucleotide sequence of interest is subcloned into a vaccinia recombination plasmid such that the nucleotide sequence's open reading frame is translationally fused to an amino-terminal tag consisting of six histidine residues. Extracts from cells infected with recombinant vaccinia virus are loaded onto Ni.sup.2+-nitriloacetic acid-agarose columns and histidine-tagged proteins are selectively eluted with imidazole-containing buffers.

[0362] Where recombinant DNA technology is used to produce the protein encoded by the novel nucleotide sequence for such assay systems, it may be advantageous to engineer fusion proteins that can facilitate labeling, immobilization and/or detection.

[0363] Indirect labeling involves the use of a protein, such as a labeled antibody, which specifically binds to the protein encoded by the novel nucleotide sequence. Such antibodies include but are not limited to polyclonal, monoclonal, chimeric, single chain, Fab fragments and fragments produced by an Fab expression library.

[0364] The invention also provides for antibodies to the protein encoded by the novel nucleotide sequences. Described herein are methods for the production of antibodies capable of specifically recognizing one or more novel nucleotide sequence epitopes. Such antibodies may include, but are not limited to polyclonal antibodies, monoclonal antibodies (mAbs), humanized or chimeric antibodies, single chain antibodies, Fab fragments, F(ab′)2 fragments, fragments produced by a Fab expression library, anti-idiotypic (anti-Id) antibodies, and epitope-binding fragments of any of the above. Such antibodies may be used, for example, in the detection of a novel nucleotide sequence in a biological sample, or, alternatively, as a method for the inhibition of abnormal gene activity, for example, the inhibition of a disease target nucleotide sequence, as further described below. Thus, such antibodies may be utilized as part of cardiovascular or other disease treatment method, and/or may be used as part of diagnostic techniques whereby patients may be tested for abnormal levels of novel nucleotide sequence encoded proteins, or for the presence of abnormal forms of the such proteins.

[0365] For the production of antibodies to a novel nucleotide sequence, various host animals may be immunized by injection with a novel protein encoded by the novel nucleotide sequence, or a portion thereof. Such host animals may include but are not limited to rabbits, mice, and rats, to name but a few. Various adjuvants may be used to increase the immunological response, depending on the host species, including but not limited to Freund's (complete and incomplete), mineral gels such as aluminum hydroxide, surface active substances such as lysolecithin, pluronic polyols, polyanions, peptides, oil emulsions, keyhole limpet hemocyanin, dinitrophenol, and potentially useful human adjuvants such as BCG (bacille Calmette-Guerin) and Corynebacterium parvum.

[0366] Polyclonal antibodies are heterogeneous populations of antibody molecules derived from the sera of animals immunized with an antigen, such as novel gene product, or an antigenic functional derivative thereof. For the production of polyclonal antibodies, host animals such as those described above, may be immunized by injection with novel gene product supplemented with adjuvants as also described above.

[0367] Monoclonal antibodies, which are homogeneous populations of antibodies to a particular antigen, may be obtained by any technique which provides for the production of antibody molecules by continuous cell lines in culture. These include, but are not limited to the hybridoma technique of Kohler and Milstein, (1975, Nature 256:495-497; and U.S. Pat. No. 4,376,110), the human B-cell hybridoma technique (Kosbor et al., 1983, Immunology Today 4:72; Cole et al., 1983, Proc. Natl. Acad. Sci. USA 80:2026-2030), and the EBV-hybridoma technique (Cole et al., 1985, Monoclonal Antibodies And Cancer Therapy, Alan R. Liss, Inc., pp. 77-96). Such antibodies may be of any immunoglobulin class including IgG, IgM, IgE, IgA, IgD and any subclass thereof. The hybridoma producing the mAb of this invention may be cultivated in vitro or in vivo.

[0368] In addition, techniques developed for the production of “chimeric antibodies” (Morrison et al., 1984, Proc. Natl. Acad. Sci., 81:6851-6855; Neuberger et al., 1984, Nature, 312:604-608; Takeda et al., 1985, Nature, 314:452-454) by splicing the genes from a mouse antibody molecule of appropriate antigen specificity together with genes from a human antibody molecule of appropriate biological activity can be used. A chimeric antibody is a molecule in which different portions are derived from different animal species, such as those having a variable region derived from a murine mAb and a human immunoglobulin constant region.

[0369] Alternatively, techniques described for the production of single chain antibodies (U.S. Pat. No. 4,946,778; Bird, 1988, Science 242:423-426; Huston et al., 1988, Proc. Natl. Acad. Sci. USA 85:5879-5883; and Ward et al., 1989, Nature 334:544-546) can be adapted to produce novel nucleotide sequence-single chain antibodies. Single chain antibodies are formed by linking the heavy and light chain fragments of the Fv region via an amino acid bridge, resulting in a single chain polypeptide.

[0370] Antibody fragments which recognize specific epitopes may be generated by known techniques For example, such fragments include but are not limited to: the F(ab′)2 fragments which can be produced by pepsin digestion of the antibody molecule and the Fab fragments which can be generated by reducing the disulfide bridges of the F(ab′)2 fragments. Alternatively, Fab expression libraries may be constructed (Huse et al., 1989, Science, 246:1275-1281) to allow rapid and easy identification of monoclonal Fab fragments with the desired specificity.

[0371] Disease Specific Target Nucleotide Sequences

[0372] The invention also provides disease specific target nucleotide sequences, and sets of disease specific target nucleotide sequences. The diagnostic nucleotide sets, subsets thereof, novel nucleotide sequences, and individual members of the diagnostic nucleotide sets identified as described above are also disease specific target nucleotide sequences. In particular, individual nucleotide sequences that are differentially regulated or have predictive value that is strongly correlated with a disease or disease criterion are especially favorable as disease specific target nucleotide sequences. Sets of genes that are co-regulated may also be identified as disease specific target nucleotide sets. Such nucleotide sequences and/or nucleotide sequence products are targets for modulation by a variety of agents and techniques. For example, disease specific target nucleotide sequences (or the products of such nucleotide sequences, or sets of disease specific target nucleotide sequences) can be inhibited or activated by, e.g., target specific monoclonal antibodies or small molecule inhibitors, or delivery of the nucleotide sequence or gene product of the nucleotide sequence to patients. Also, sets of genes can be inhibited or activated by a variety of agents and techniques. The specific usefulness of the target nucleotide sequence(s) depends on the subject groups from which they were discovered, and the disease or disease criterion with which they correlate.

[0373] Imaging

[0374] The invention also provides for imaging reagents. The differentially expressed leukocyte nucleotide sequences, diagnostic nucleotide sets, or portions thereof, and novel nucleotide sequences of the invention are nucleotide sequences expressed in cells with or without disease. Leukocytes expressing a nucleotide sequence(s) that is differentially expressed in a disease condition may localize within the body to sites that are of interest for imaging purposes. For example, a leukocyte expressing a nucleotide sequence(s) that are differentially expressed in an individual having atherosclerosis may localize or accumulate at the site of an atherosclerotic placque. Such leukocytes, when labeled, may provide a detection reagent for use in imaging regions of the body where labeled leukocyte accumulate or localize, for example, at the atherosclerotic plaque in the case of atherosclerosis. For example, leukocytes are collected from a subject, labeled in vitro, and reintroduced into a subject. Alternatively, the labeled reagent is introduced into the subject individual, and leukocyte labeling occurs within the patient.

[0375] Imaging agents that detect the imaging targets of the invention are produced by well-known molecular and immunological methods (for exemplary protocols, see, e.g., Ausubel, Berger, and Sambrook, as well as Harlow and Lane, supra).

[0376] For example, a full-length nucleic acid sequence, or alternatively, a gene fragment encoding an immunogenic peptide or polypeptide fragments, is cloned into a convenient expression vector, for example, a vector including an in-frame epitope or substrate binding tag to facilitate subsequent purification. Protein is then expressed from the cloned cDNA sequence and used to generate antibodies, or other specific binding molecules, to one or more antigens of the imaging target protein. Alternatively, a natural or synthetic polypeptide (or peptide) or small molecule that specifically binds (or is specifically bound to) the expressed imaging target can be identified through well established techniques (see, e.g., Mendel et al. (2000) Anticancer Drug Des 15:29-41; Wilson (2000) Curr Med Chem 7:73-98; Hamby and Showwalter (1999) Pharmacol Ther 82:169-93; and Shimazawa et al. (1998) Curr Opin Struct Biol 8:451-8). The binding molecule, e.g., antibody, small molecule ligand, etc., is labeled with a contrast agent or other detectable label, e.g., gadolinium, iodine, or a gamma-emitting source. For in-vivo imaging of a disease process that involved leukocytes, the labeled antibody is infused into a subject, e.g., a human patient or animal subject, and a sufficient period of time is passed to permit binding of the antibody to target cells. The subject is then imaged with appropriate technology such as MRI (when the label is gadolinium) or with a gamma counter (when the label is a gamma emitter).

[0377] Identification of Nucleotide Sequence Involved in Leukocyte Adhesion

[0378] The invention also encompasses a method of identifying nucleotide sequences involved in leukocyte adhesion. The interaction between the endothelial cell and leukocyte is a fundamental mechanism of all inflammatory disorders, including the diseases listed in Table 1. For example, the first visible abnormality in atherosclerosis is the adhesion to the endothelium and diapedesis of mononuclear cells (e.g., T-cell and monocyte). Insults to the endothelium (for example, cytokines, tobacco, diabetes, hypertension and many more) lead to endothelial cell activation. The endothelium then expresses adhesion molecules, which have counter receptors on mononuclear cells. Once the leukocyte receptors have bound the endothelial adhesion molecules, they stick to the endothelium, roll a short distance, stop and transmigrate across the endothelium. A similar set of events occurs in both acute and chronic inflammation. When the leukocyte binds the endothelial adhesion molecule, or to soluble cytokines secreted by endothelial or other cells, a program of gene expression is activated in the leukocyte. This program of expression leads to leukocyte rolling, firm adhesion and transmigration into the vessel wall or tissue parenchyma. Inhibition of this process is highly desirable goal in anti-inflammatory drug development. In addition, leukocyte nucleotide sequences and epithelial cell nucleotide sequences, that are differentially expressed during this process may be disease-specific target nucleotide sequences.

[0379] Human endothelial cells, e.g. derived from human coronary arteries, human aorta, human pulmonary artery, human umbilical vein or microvascular endothelial cells, are cultured as a confluent monolayer, using standard methods. Some of the endothelial cells are then exposed to cytokines or another activating stimuli such as oxidized LDL, hyperglycemia, shear stress, or hypoxia (Moser et al. 1992). Some endothelial cells are not exposed to such stimuli and serve as controls. For example, the endothelial cell monolayer is incubated with culture medium containing 5 U/ml of human recombinant IL-1alpha or 10 ng/ml TNF (tumor necrosis factor), for a period of minutes to overnight. The culture medium composition is changed or the flask is sealed to induce hypoxia. In addition, tissue culture plate is rotated to induce sheer stress.

[0380] Human T-cells and/or monocytes are cultured in tissue culture flasks or plates, with LGM-3 media from Clonetics. Cells are incubated at 37 degree C., 5% CO2 and 95% humidity. These leukocytes are exposed to the activated or control endothelial layer by adding a suspension of leukocytes on to the endothelial cell monolayer. The endothelial cell monolayer is cultured on a tissue culture treated plate/flask or on a microporous membrane. After a variable duration of exposures, the endothelial cells and leukocytes are harvested separately by treating all cells with trypsin and then sorting the endothelial cells from the leukocytes by magnetic affinity reagents to an endothelial cell specific marker such as PECAM-1 (Stem Cell Technologies). RNA is extracted from the isolated cells by standard techniques. Leukocyte RNA is labeled as described above, and hybridized to leukocyte candidate nucleotide library. Epithelial cell RNA is also labeled and hybridized to the leukocyte candidate nucleotide library. Alternatively, the epithelial cell RNA is hybridized to a epithelial cell candidate nucleotide library, prepared according to the methods described for leukocyte candidate libraries, above.

[0381] Hybridization to candidate nucleotide libraries will reveal nucleotide sequences that are up-regulated or down-regulated in leukocyte and/or epithelial cells undergoing adhesion. The differentially regulated nucleotide sequences are further characterized, e.g. by isolating and sequencing the full-length sequence, analysis of the DNA and predicted protein sequence, and functional characterization of the protein product of the nucleotide sequence, as described above. Further characterization may result in the identification of leukocyte adhesion specific target nucleotide sequences, which may be candidate targets for regulation of the inflammatory process. Small molecule or antibody inhibitors can be developed to inhibit the target nucleotide sequence function. Such inhibitors are tested for their ability to inhibit leukocyte adhesion in the in vitro test described above.

[0382] Integrated Systems

[0383] Integrated systems for the collection and analysis of expression profiles, and molecular signatures, as well as for the compilation, storage and access of the databases of the invention, typically include a digital computer with software including an instruction set for sequence searching and analysis, and, optionally, high-throughput liquid control software, image analysis software, data interpretation software, a robotic control armature for transferring solutions from a source to a destination (such as a detection device) operably linked to the digital computer, an input device (e.g., a computer keyboard) for entering subject data to the digital computer, or to control analysis operations or high throughput sample transfer by the robotic control armature. Optionally, the integrated system further comprises an image scanner for digitizing label signals from labeled assay components, e.g., labeled nucleic acid hybridized to a candidate library microarray. The image scanner can interface with image analysis software to provide a measurement of the presence or intensity of the hybridized label, i.e., indicative of an on/off expression pattern or an increase or decrease in expression.

[0384] Readily available computational hardware resources using standard operating systems are fully adequate, e.g., a PC (Intel x86 or Pentium chip-compatible DOS,™ OS2,™ WINDOWS,™ WINDOWS NT,™ WINDOWS95,™ WINDOWS98,™ LINUX, or even Macintosh, Sun or PCs will suffice) for use in the integrated systems of the invention. Current art in software technology is similarly adequate (i.e., there are a multitude of mature programming languages and source code suppliers) for design, e.g., of an upgradeable open-architecture object-oriented heuristic algorithm, or instruction set for expression analysis, as described herein. For example, software for aligning or otherwise manipulating molecular signatures can be constructed by one of skill using a standard programming language such as Visual basic, Fortran, Basic, Java, or the like, according to the methods herein.

[0385] Various methods and algorithms, including genetic algorithms and neural networks, can be used to perform the data collection, correlation, and storage functions, as well as other desirable functions, as described herein. In addition, digital or analog systems such as digital or analog computer systems can control a variety of other functions such as the display and/or control of input and output files.

[0386] For example, standard desktop applications such as word processing software (e.g., Corel WordPerfect™ or Microsoft Word™) and database software (e.g., spreadsheet software such as Corel Quattro PrO™, Microsoft Excel™, or database programs such as Microsoft Access™ or Paradox™) can be adapted to the present invention by inputting one or more character string corresponding, e.g., to an expression pattern or profile, subject medical or historical data, molecular signature, or the like, into the software which is loaded into the memory of a digital system, and carrying out the operations indicated in an instruction set, e.g., as exemplified in FIG. 2. For example, systems can include the foregoing software having the appropriate character string information, e.g., used in conjunction with a user interface in conjunction with a standard operating system such as a Windows, Macintosh or LINUX system. For example, an instruction set for manipulating strings of characters, either by programming the required operations into the applications or with the required operations performed manually by a user (or both). For example, specialized sequence alignment programs such as PILEUP or BLAST can also be incorporated into the systems of the invention, e.g., for alignment of nucleic acids or proteins (or corresponding character strings).

[0387] Software for performing the statistical methods required for the invention, e.g., to determine correlations between expression profiles and subsets of members of the diagnostic nucleotide libraries, such as programmed embodiments of the statistical methods described above, are also included in the computer systems of the invention. Alternatively, programming elements for performing such methods as principle component analysis (PCA) or least squares analysis can also be included in the digital system to identify relationships between data. Exemplary software for such methods is provided by Partek, Inc., St. Peter, Mo.; http://www.partek.com.

[0388] Any controller or computer optionally includes a monitor which can include, e.g., a flat panel display (e.g., active matrix liquid crystal display, liquid crystal display), a cathode ray tube (“CRT”) display, or another display system which serves as a user interface, e.g., to output predictive data. Computer circuitry, including numerous integrated circuit chips, such as a microprocessor, memory, interface circuits, and the like, is often placed in a casing or box which optionally also includes a hard disk drive, a floppy disk drive, a high capacity removable drive such as a writeable CD-ROM, and other common peripheral elements.

[0389] Inputting devices such as a keyboard, mouse, or touch sensitive screen, optionally provide for input from a user and for user selection, e.g., of sequences or data sets to be compared or otherwise manipulated in the relevant computer system. The computer typically includes appropriate software for receiving user instructions, either in the form of user input into a set parameter or data fields (e.g., to input relevant subject data), or in the form of preprogrammed instructions, e.g., preprogrammed for a variety of different specific operations. The software then converts these instructions to appropriate language for instructing the system to carry out any desired operation.

[0390] The integrated system may also be embodied within the circuitry of an application specific integrated circuit (ASIC) or programmable logic device (PLD). In such a case, the invention is embodied in a computer readable descriptor language that can be used to create an ASIC or PLD. The integrated system can also be embodied of the barrier during the centrifugation). After centrifugation, the erythrocytes and granulocytes are trapped beneath the barrier, facilitating isolation of the mononuclear cell and serum layers. A mechanical arm removes the tube and inverts it to mix the mononuclear cell layer and the serum (C). The arm next pours the supernatant into a fresh tube (D), while the erythrocytes and granulocytes remained below the barrier. Alternatively, a needle is used to aspirate the supernatant and transfer it to a fresh tube. The mechanical arms of the device opens and closes lids, dispenses PBS to aid in the collection of the mononuclear cells by centrifugation, and moves the tubes in and out of the centrifuge. Following centrifugation, the supernatant is poured off or removed by a vacuum device (E), leaving an isolated mononuclear cell pellet. Purification of the RNA from the cells is performed automatically, with lysis buffer and other purification solutions (F) automatically dispensed and removed before and after centrifugation steps. The result is a purified RNA solution. In another embodiment, RNA isolation is performed using a column or filter method. In yet another embodiment, the invention includes an on-board homogenizer for use in cell lysis.

[0391] Other Automated Systems

[0392] Automated and/or semi-automated methods for solid and liquid phase high-throughput sample preparation and evaluation are available, and supported by commercially available devices. For example, robotic devices for preparation of nucleic acids from bacterial colonies, e.g., to facilitate production and characterization of the candidate library include, for example, an automated colony picker (e.g., the Q-bot, Genetix, U.K.) capable of identifying, sampling, and inoculating up to 10,000/4 hrs different clones into 96 well microtiter dishes. Alternatively, or in addition, robotic systems for liquid handling are available from a variety of sources, e.g., automated workstations like the automated synthesis apparatus developed by Takeda Chemical Industries, LTD. (Osaka, Japan) and many robotic systems utilizing robotic arms (Zymate II, Zymark Corporation, Hopkinton, Mass.; Orca, Beckman Coulter, Inc. (Fullerton, Calif.)) which mimic the manual operations performed by a scientist. Any of the above devices are suitable for use with the present invention, e.g., for high-throughput analysis of library components or subject leukocyte samples. The nature and implementation of modifications to these devices (if any) so that they can operate as discussed herein will be apparent to persons skilled in the relevant art.

[0393] High throughput screening systems that automate entire procedures, e.g., sample and reagent pipetting, liquid dispensing, timed incubations, and final readings of the microplate in detector(s) appropriate for the relevant assay are commercially available. (see, e.g., Zymark Corp., Hopkinton, Mass.; Air Technical Industries, Mentor, Ohio; Beckman Instruments, Inc. Fullerton, Calif.; Precision Systems, Inc., Natick, Mass., etc.). These configurable systems provide high throughput and rapid start up as well as a high degree of flexibility and customization. Similarly, arrays and array readers are available, e.g., from Affymetrix, PE Biosystems, and others.

[0394] The manufacturers of such systems provide detailed protocols the various high throughput. Thus, for example, Zymark Corp. provides technical bulletins describing screening systems for detecting the modulation of gene transcription, ligand binding, and the like.

[0395] A variety of commercially available peripheral equipment, including, e.g., optical and fluorescent detectors, optical and fluorescent microscopes, plate readers, CCD arrays, phosphorimagers, scintillation counters, phototubes, photodiodes, and the like, and software is available for digitizing, storing and analyzing a digitized video or digitized optical or other assay results, e.g., using PC (Intel x86 or pentium chip-compatible DOS™, OS2™ WINDOWS™, WINDOWS NT™ or WINDOWS95™ based machines), MACINTOSH™, or UNIX based (e.g., SUN™ work station) computers.

[0396] Embodiment in a Web Site.

[0397] The methods described above can be implemented in a localized or distributed computing environment. For example, if a localized computing environment is used, an array comprising a candidate nucleotide library, or diagnostic nucleotide set, is configured in proximity to a detector, which is, in turn, linked to a computational device equipped with user input and output features.

[0398] In a distributed environment, the methods can be implemented on a single computer with multiple processors or, alternatively, on multiple computers. The computers can be linked, e.g. through a shared bus, but more commonly, the computer(s) are nodes on a network. The network can be generalized or dedicated, at a local level or distributed over a wide geographic area. In certain embodiments, the computers are components of an intra-net or an internet.

[0399] The predictive data corresponding to subject molecular signatures (e.g., expression profiles, and related diagnostic, prognostic, or monitoring results) can be shared by a variety of parties. In particular, such information can be utilized by the subject, the subject's health care practitioner or provider, a company or other institution, or a scientist. An individual subject's data, a subset of the database or the entire database recorded in a computer readable medium can be accessed directly by a user by any method of communication, including, but not limited to, the internet. With appropriate computational devices, integrated systems, communications networks, users at remote locations, as well as users located in proximity to, e.g., at the same physical facility, the database can access the recorded information. Optionally, access to the database can be controlled using unique alphanumeric passwords that provide access to a subset of the data. Such provisions can be used, e.g., to ensure privacy, anonymity, etc.

[0400] Typically, a client (e.g., a patient, practitioner, provider, scientist, or the like) executes a Web browser and is linked to a server computer executing a Web server. The Web browser is, for example, a program such as IBM's Web Explorer, Internet explorer, NetScape or Mosaic, or the like. The Web server is typically, but not necessarily, a program such as IBM's HTTP Daemon or other WWW daemon (e.g., LINUX-based forms of the program). The client computer is bi-directionally coupled with the server computer over a line or via a wireless system. In turn, the server computer is bi-directionally coupled with a website (server hosting the website) providing access to software implementing the methods of this invention.

[0401] A user of a client connected to the Intranet or Internet may cause the client to request resources that are part of the web site(s) hosting the application(s) providing an implementation of the methods described herein. Server program(s) then process the request to return the specified resources (assuming they are currently available). A standard naming convention has been adopted, known as a Uniform Resource Locator (“URL”). This convention encompasses several types of location names, presently including subclasses such as Hypertext Transport Protocol (“http”), File Transport Protocol (“ftp”), gopher, and Wide Area Information Service (“WAIS”). When a resource is downloaded, it may include the URLs of additional resources. Thus, the user of the client can easily learn of the existence of new resources that he or she had not specifically requested.

[0402] Methods of implementing Intranet and/or Intranet embodiments of computational and/or data access processes are well known to those of skill in the art and are documented, e.g., in ACM Press, pp. 383-392; ISO-ANSI, Working Draft, “Information Technology-Database Language SQL”, Jim Melton, Editor, International Organization for Standardization and American National Standards Institute, July 1992; ISO Working Draft, “Database Language SQL-Part 2:Foundation (SQL/Foundation)”, CD9075-2:199.chi.SQL, Sep. 11, 1997; and Cluer et al. (1992) A General Framework for the Optimization of Object-Oriented Queries, Proc SIGMOD International Conference on Management of Data, San Diego, Calif., Jun. 2-5, 1992, SIGMOD Record, vol. 21, Issue 2, June, 1992; Stonebraker, M., Editor. Other resources are available, e.g., from Microsoft, IBM, Sun and other software development companies.

[0403] Using the tools described above, users of the reagents, methods and database as discovery or diagnostic tools can query a centrally located database with expression and subject data. Each submission of data adds to the sum of expression and subject information in the database. As data is added, a new correlation statistical analysis is automatically run that incorporates the added clinical and expression data. Accordingly, the predictive accuracy and the types of correlations of the recorded molecular signatures increases as the database grows.

[0404] For example, subjects, such as patients, can access the results of the expression analysis of their leukocyte samples and any accrued knowledge regarding the likelihood of the patient's belonging to any specified diagnostic (or prognostic, or monitoring, or risk group), i.e., their expression profiles, and/or molecular signatures. Optionally, subjects can add to the predictive accuracy of the database by providing additional information to the database regarding diagnoses, test results, clinical or other related events that have occurred since the time of the expression profiling. Such information can be provided to the database via any form of communication, including, but not limited to, the internet. Such data can be used to continually define (and redefine) diagnostic groups. For example, if 1000 patients submit data regarding the occurrence of myocardial infarction over the 5 years since their expression profiling, and 300 of these patients report that they have experienced a myocardial infarction and 700 report that they have not, then the 300 patients define a new “group A.” As the algorithm is used to continually query and revise the database, a new diagnostic nucleotide set that differentiates groups A and B (i.e., with and without myocardial infarction within a five year period) is identified. This newly defined nucleotide set is then be used (in the manner described above) as a test that predicts the occurrence of myocardial infarction over a five-year period. While submission directly by the patient is exemplified above, any individual with access and authority to submit the relevant data e.g., the patient's physician, a laboratory technician, a health care or study administrator, or the like, can do so.

[0405] As will be apparent from the above examples, transmission of information via the internet (or via an intranet) is optionally bi-directional. That is, for example, data regarding expression profiles, subject data, and the like are transmitted via a communication system to the database, while information regarding molecular signatures, predictive analysis, and the like, are transmitted from the database to the user. For example, using appropriate configurations of an integrated system including a microarray comprising a diagnostic nucleotide set, a detector linked to a computational device can directly transmit (locally or from a remote workstation at great distance, e.g., hundreds or thousands of miles distant from the database) expression profiles and a corresponding individual identifier to a central database for analysis according to the methods of the invention. According to, e.g., the algorithms described above, the individual identifier is assigned to one or more diagnostic (or prognostic, or monitoring, etc.) categories. The results of this classification are then relayed back, via, e.g., the same mode of communication, to a recipient at the same or different internet (or intranet) address.

[0406] Kits

[0407] The present invention is optionally provided to a user as a kit. Typically, a kit contains one or more diagnostic nucleotide sets of the invention. Alternatively, the kit contains the candidate nucleotide library of the invention. Most often, the kit contains a diagnostic nucleotide probe set, or other subset of a candidate library, e.g., as a cDNA or antibody microarray packaged in a suitable container. The kit may further comprise, one or more additional reagents, e.g., substrates, labels, primers, for labeling expression products, tubes and/or other accessories, reagents for collecting blood samples, buffers, e.g., erythrocyte lysis buffer, leukocyte lysis buffer, hybridization chambers, cover slips, etc., as well as a software package, e.g., including the statistical methods of the invention, e.g., as described above, and a password and/or account number for accessing the compiled database. The kit optionally further comprises an instruction set or user manual detailing preferred methods of using the diagnostic nucleotide sets in the methods of the invention. Exemplary kits are described in FIG. 3.

[0408] This invention will be better understood by reference to the following non-limiting Examples:

### EXAMPLES

List of Example Titles

Example 1: Generation of subtracted leukocyte candidate nucleotide library

Example 2: Identification of nucleotide sequences for candidate library using data mining techniques

Example 3: DNA Sequencing and Processing of raw sequence data.

Example 4: Further sequence analysis of novel nucleotide sequences identified by subtractive hybridization screening

Example 5: Further sequence analysis of novel Clone 596H6

Example 6: Further sequence analysis of novel Clone 486E1

Example 7: Preparation of a leukocyte cDNA array comprising a candidate gene library

Example 8: Preparation of RNA from mononuclear cells for expression profiling

Example 9: Preparation of Buffy Coat Control RNA for use in leukocyte expression profiling

Example 10. RNA Labeling and hybridization to a leukocyte cDNA array of candidate nucleotide sequences.

Example 11: Identification of diagnostic gene sets useful in diagnosis and treatment of Cardiac allograft rejection

Example 12: Identification of diagnostic nucleotide sets for kidney and liver allograft rejection

Example 13: Identification of diagnostic nucleotide sequences sets for use in the diagnosis and treatment of Atherosclerosis, Stable Angina Pectoris, and acute coronary syndrome.

Example 14: Identification of diagnostic nucleotide sets for use in diagnosing and treating Restenosis

Example 15: Identification of diagnostic nucleotide sets for use in monitoring treatment and/or progression of Congestive Heart Failure

Example 16: Identification of diagnostic nucleotide sets for use in diagnosis of rheumatoid arthritis.

Example 17: Identification of diagnostic nucleotide sets for diagnosis of cytomegalovirus

Example 18: Identification of diagnostic nucleotide sets for diagnosis of Epstein Barr Virus

Example 19: Identification of diagnostic nucleotides sets for monitoring response to statin drugs.

Example 20: Probe selection for a 24,000 feature Array.

Example 21: Design of oligonucleotide probes.

Example 22: Production of an array of 8,000 spotted 50 mer oligonucleotides.

Example 23: Amplification, labeling and hybridization of total RNA to an oligonucleotide microarray.

Example 24:Analysis of Human Transplant Patient Mononuclear cell RNA Hybridized to a 24,000 Feature Microarray.

### Examples

### Example 1

### Generation of Subtracted Leukocyte Candidate Nucleotide Library

[0409] To produce a candidate nucleotide library with representatives from the spectrum of nucleotide sequences that are differentially expressed in leukocytes, subtracted hybridization libraries were produced from the following cell types and conditions:

[0410] 1. Buffy Coat leukocyte fractions—stimulated with ionomycin and PMA

[0411] 2. Buffy Coat leukocyte fractions—un-stimulated

[0412] 3. Peripheral blood mononuclear cells—stimulated with ionomycin and PMA

[0413] 4. Peripheral blood mononuclear cells—un-stimulated

[0414] 5. T lymphocytes—stimulated with PMA and ionomycin

[0415] 6. T lymphocytes—resting

Cells were obtained from multiple individuals to avoid introduction of bias by using only one person as a cell source.

[0416] Buffy coats (platelets and leukocytes that are isolated from whole blood) were purchased from Stanford Medical School Blood Center. Four buffy coats were used, each of which was derived from about 350 ml of whole blood from one donor individual 10 ml of buffy coat sample was drawn from the sample bag using a needle and syringe. 40 ml of Buffer EL (Qiagen) was added per 10 ml of buffy coat to lyse red blood cells. The sample was placed on ice for 15 minutes, and cells were collected by centrifugation at 2000 rpm for 10 minutes. The supernatant was decanted and the cell pellet was re-suspended in leukocyte growth media supplemented with DNase (LGM-3 from Clonetics supplemented with Dnase at a final concentration of 30 U/ml). Cell density was determined using a hemocytometer. Cells were plated in media at a density of 1×10⁶ cells/ml in a total volume of 30 ml in a T-75 flask (Corning). Half of the cells were stimulated with ionomycin and phorbol myristate acetate (PMA) at a final concentration of 1 μg/ml and 62 ng/ml, respectively. Cells were incubated at 37° C. and at 5% CO₂ for 3 hours, then cells were scraped off the flask and collected into 50 ml tubes. Stimulated and resting cell populations were kept separate. Cells were centrifuged at 2000 rpm for 10 minutes and the supernatant was removed. Cells were lysed in 6 ml of phenol/guanidine isothyocyanate (Trizol reagent, GibcoBRL), homogenized using a rotary homogenizer, and frozen at 80°. Total RNA and mRNA were isolated as described below.

[0417] Two frozen vials of 5×10⁶ human peripheral blood mononuclear cells (PBMCs) were purchased from Clonetics (catalog number cc-2702). The cells were rapidly thawed in a 37° C. water bath and transferred to a 15 ml tube containing 10 ml of leukocyte growth media supplemented with DNase (prepared as described above). Cells were centrifuged at 200 μg for 10 minutes. The supernatant was removed and the cell pellet was resuspended in LGM-3 media supplemented with DNase. Cell density was determined using a hemocytometer. Cells were plated at a density of 1×10⁶ cells/ml in a total volume of 30 ml in a T-75 flask (Corning). Half of the cells were stimulated with ionomycin and PMA at a final concentration of 1 μg/ml and 62 ng/ml, respectively. Cells were incubated at 37° C. and at 5% CO₂ for 3 hours, then cells were scraped off the flask and collected into 50 ml tubes. Stimulated and resting cell populations were kept separate. Cells were centrifuged at 2000 rpm and the supernatant was removed. Cells were lysed in 6 ml of phenol/guanidine isothyocyanate solution (TRIZOL reagent, GibcoBRL)), homogenized using a rotary homogenizer, and frozen at 80°. Total RNA and mRNA were isolated from these samples using the protocol described below.

[0418] 45 ml of whole blood was drawn from a peripheral vein of four healthy human subjects into tubes containing anticoagulant. 50 μl RosetteSep (Stem Cell Technologies) cocktail per ml of blood was added, mixed well, and incubated for 20 minutes at room temperature. The mixture was diluted with an equal volume of PBS+2% fetal bovine serum (FBS) and mixed by inversion. 30 ml of diluted mixture sample was layered on top of 15 ml DML medium (Stem Cell Technologies). The sample tube was centrifuged for 20 minutes at 1200×g at room temperature. The enriched T-lymphocyte cell layer at the plasma: medium interface was removed. Enriched cells were washed with PBS+2% FBS and centrifuged at 1200×g. The cell pellet was treated with 5 ml of erythrocyte lysis buffer (EL buffer, Qiagen) for 10 minutes on ice. The sample was centrifuged for 5 min at 1200 g. Cells were plated at a density of 1×10⁶ cells/ml in a total volume of 30 ml in a T-75 flask (Corning). Half of the cells were stimulated with ionomycin and PMA at a final concentration of 1 μg/ml and 62 ng/ml, respectively. Cells were incubated at 37° C. and at 5% CO₂ for 3 hours, then cells were scraped off the flask and collected into 50 ml tubes. Stimulated and resting cell populations were kept separate. Cells were centrifuged at 2000 rpm and the supernatant was removed. Cells were lysed in 6 ml of phenol/guanidine isothyocyanate solution (TRIZOL reagent, GibcoBRL), homogenized using a rotary homogenizer, and frozen at 80°. Total RNA and mRNA were isolated as described below.

[0419] Total RNA and mRNA were isolated using the following procedure: the homogenized samples were thawed and mixed by vortexing. Samples were lysed in a 1:0.2 mixture of Trizol and chloroform, respectively. For some samples, 6 ml of Trizol-chloroform was added. Variable amounts of Trizol-chloroform was added to other samples. Following lysis, samples were centrifuged at 3000 g for 15 min at 4° C. The aqueous layer was removed into a clean tube and 4 volumes of Buffer RLT Qiagen) was added for every volume of aqueous layer. The samples were mixed thoroughly and total RNA was prepared from the sample by following the Qiagen Rneasy midi protocol for RNA cleanup (October 1999 protocol, Qiagen). For the final step, the RNA was eluted from the column twice with 250 μl Rnase-free water. Total RNA was quantified using a spectrophotometer. Isolation of mRNA from total RNA sample was done using The Oligotex mRNA isolation protocol (Qiagen) was used to isolate mRNA from total RNA, according to the manufacturer's instructions (Qiagen, 7/99 version). mRNA was quantified by spectrophotometry.

[0420] Subtracted cDNA libraries were prepared using Clontech's PCR-Select cDNA Subtraction Kit (protocol number PT-1117-1) as described in the manufacturer's protocol. The protocol calls for two sources of RNA per library, designated “Driver” and “Tester.” The following 6 libraries were made:

| Library | Driver RNA | Tester RNA |
|---|---|---|
| Buffy Coat Stimulated | Un-stimulated Buffy | Stimulated Buffy Coat |
| | Coat | |
| Buffy Coat Resting | Stimulated Buffy Coat | Un-stimulated Buffy |
| | | Coat |
| PBMC Stimulated | Un-stimulated PBMCs | Stimulated PBMCs |
| PBMC Resting | Stimulated PBMCs | Un-stimulated PBMCs |
| T-cell Stimulated | Un-stimulated T-cells | Stimulated T-cells |
| T-cell Resting | Stimulated T-cells | Un-stimulated T-cells |

[0421] The Clontech protocol results in the PCR amplification of cDNA products. The PCR products of the subtraction protocol were ligated to the pGEM T-easy bacterial vector as described by the vector manufacturer (Promega 6/99 version). Ligated vector was transformed into competent bacteria using well-known techniques, plated, and individual clones are picked, grown and stored as a glycerol stock at −80 C. Plasmid DNA was isolated from these bacteria by standard techniques and used for sequence analysis of the insert. Unique cDNA sequences were searched in the Unigene database (build 133), and Unigene cluster numbers were identified that corresponded to the DNA sequence of the cDNA. Unigene cluster numbers were recorded in an Excel spreadsheet.

### Example 2

### Identification of Nucleotide Sequences for Candidate Library Using Data Mining Techniques

[0422] Existing and publicly available gene sequence databases were used to identify candidate nucleotide sequences for leukocyte expression profiling. Genes and nucleotide sequences with specific expression in leukocytes, for example, lineage specific markers, or known differential expression in resting or activated leukocytes were identified. Such nucleotide sequences are used in a leukocyte candidate nucleotide library, alone or in combination with nucleotide sequences isolated through cDNA library construction, as described above.

[0423] Leukocyte candidate nucleotide sequences were identified using three primary methods. First, the publically accessible publication database PubMed was searched to identify nucleotide sequences with known specific or differential expression in leukocytes. Nucleotide sequences were identified that have been demonstrated to have differential expression in peripheral blood leukocytes between subjects with and without particular disease(s) selected from Table 1. Additionally, genes and gene sequences that were known to be specific or selective for leukocytes or sub-populations of leukocytes were identified in this way.

[0424] Next, two publicly available databases of DNA sequences, Unigene (http://www.ncbi.nlm.nih.gov/UniGene/) and BodyMap (http://bodymap.ims.u-tokyo.acjp/), were searched for sequenced DNA clones that showed specificity to leukocyte lineages, or subsets of leukocytes, or resting or activated leukocytes.

[0425] The human Unigene database (build 133) was used to identify leukocyte candidate nucleotide sequences that were likely to be highly or exclusively expressed in leukocytes. We used the Library Differential Display utility of Unigene (http://www.ncbi.nlm.nih.gov/UniGene/info/ddd.html), which uses statistical methods (The Fisher Exact Test) to identify nucleotide sequences that have relative specificity for a chosen library or group of libraries relative to each other. We compared the following human libraries from Unigene release 133:

| 546 | NCI_CGAP_HSC1 (399) | |
|---|---|---|
| 848 | Human_mRNA_from_cd34+_stem_cells (122) | |
| 105 | CD34+DIRECTIONAL (150) | |
| 3587 | KRIBB_Human_CD4_intrathymic_T-cell_cDNA_library (134) | |
| 3586 | KRIBB_Human_DP_intrathymic_T-cell_cDNA_library (179) | |
| 3585 | KRIBB_Human_TN_intrathymic_T-cell_cDNA_library (127) | |
| 3586 | 323 | Activated_T-cells_I (740) |
| 376 | Activated_T-cells_XX (1727) | |
| 327 | Monocytes,_stimulated_II (110) | |
| 824 | Proliferating_Erythroid_Cells_(LCB: ad_library) (665) | |
| 825 | 429 | Macrophage_II (105) |

| | |
|---|---|
| 387 | Macrophage_I (137) |
| 669 | NCI_CGAP_CLL1 (11626) |
| 129 | Human_White_blood_cells (922) |
| 1400 | NIH_MGC_2 (422) |
| 55 | Human_promyelocyte (1220) |
| 1010 | NCI_CGAP_CML1 (2541) |
| 2217 | NCI_CGAP_Sub7 (218) |
| 1395 | NCI_CGAP_Sub6 (2764) |
| 4874 | NIH_MGC_48 (2524) |

[0426] BodyMap, like Unigene, contains cell-specific libraries that contain potentially useful information about genes that may serve as lineage-specific or leukocyte specific markers (Okubo et al. 1992). We compared three leukocyte specific libraries, Granulocyte, CD4 T cell, and CD8 T cell, with the other libraries. Nucleotide sequences that were found in one or more of the leukocyte-specific libraries, but absent in the others, were identified. Clones that were found exclusively in one of the three leukocyte libraries were also included in a list of nucleotide sequences that could serve as lineage-specific markers.

[0427] Next, the sequence of the nucleotide sequences identified in PubMed or BodyMap were searched in Unigene (version 133), and a human Unigene cluster number was identified for each nucleotide sequence. The cluster number was recorded in a Microsoft Excel™ spreadsheet, and a non-redundant list of these clones was made by sorting the clones by UniGene number, and removing all redundant clones using Microsoft Excel™ tools. The non-redundant list of UniGene cluster numbers was then compared to the UniGene cluster numbers of the cDNAs identified using differential cDNA hybridization, as described above in Example 1 (listed in Table 3 and the sequence listing). Only UniGene clusters that were not contained in the cDNA libraries were retained. Unigene clusters corresponding to 1911 candidate nucleotide sequences for leukocyte expression profiling were identified in this way and are listed in Table 3 and the sequence listing.

[0428] DNA clones corresponding to each UniGene cluster number are obtained in a variety of ways. First, a cDNA clone with identical sequence to part of, or all of the identified UniGene cluster is bought from a commercial vendor or obtained from the IMAGE consortium (http://image.llnl.gov/, the Integrated Molecular Analysis of Genomes and their Expression). Alternatively, PCR primers are designed to amplify and clone any portion of the nucleotide sequence from cDNA or genomic DNA using well-known techniques. Alternatively, the sequences of the identified UniGene clusters are used to design and synthesize oligonucleotide probes for use in microarray based expression profiling.

### Example 3

### DNA Sequencing and Processing of Raw Sequence Data

[0429] Clones of differentially expressed cDNAs (identified by subtractive hybridization, described above) were sequenced on an MJ Research BaseStation™ slab gel based fluorescent detection system, using BigDye™ (Applied Biosystems, Foster City, Calif.) terminator chemistry was used (Heiner et al., Genome Res 1998 May; 8(5):557-61).

[0430] The fluorescent profiles were analyzed using the Phred sequence analysis program (Ewing et al, (1998), Genome Research 8: 175-185). Analysis of each clone results in a one pass nucleotide sequence and a quality file containing a number for each base pair with a score based on the probability that the determined base is correct. Each sequence files and its respective quality files were initially combined into single fasta format (Pearson, WR. Methods Mol. Biol. 2000; 132:185-219), multi-sequence file with the appropriate labels for each clone in the headers for subsequent automated analysis.

[0431] Initially, known sequences were analyzed by pair wise similarity searching using the blastn option of the blastall program obtained from the National Center for Biological Information, National Library of Medicine, National Institutes of Health (NCBI) to determine the quality score that produced accurate matching (Altschul S F, et al. J Mol. Biol. 1990 Oct. 5; 215(3):403-10.). Empirically, it was determined that a raw score of 8 was the minimum that contained useful information. Using a sliding window average for 16 base pairs, an average score was determined. The sequence was removed (trimmed) when the average score fell below 8. Maximum reads were 950 nucleotides long.

[0432] Next, the sequences were compared by similarity matching against a database file containing the flanking vector sequences used to clone the cDNA, using the blastall program with the blastn option. All regions of vector similarity were removed, or “trimmed” from the sequences of the clones using scripts in the GAWK programming language, a variation of AWK (Aho A V et al, The Awk Programming Language (Addison-Wesley, Reading Mass., 1988); Robbins, AD, “Effective AWK Programming” (Free Software Foundation, Boston Mass., 1997). It was found that the first 45 base pairs of all the sequences were related to vector; these sequences were also trimmed and thus removed from consideration. The remaining sequences were then compared against the NCBI vector database (Kitts, P. A. et al. National Center for Biological Information, National Library of Medicine, National Institutes of Health, Manuscript in preparation (2001) using blastall with the blastn option. Any vector sequences that were found were removed from the sequences.

[0433] Messenger RNA contains repetitive elements that are found in genomic DNA. These repetitive elements lead to false positive results in similarity searches of query mRNA sequences versus known mRNA and EST databases. Additionally, regions of low information content (long runs of the same nucleotide, for example) also result in false positive results. These regions were masked using the program RepeatMasker2 found at http://repeatmasker.genome.washington.edu (Smit, AFA & Green, P “RepeatMasker” at http://ftp.genome.washington.edu/RM/RepeatMasker.html). The trimmed and masked files were then subjected to further sequence analysis.

### Example 4

### Further Sequence Analysis of Novel Nucleotide Sequences Identified by Subtractive Hybridization Screening

[0434] cDNA sequences were further characterized using BLAST analysis. The BLASTN program was used to compare the sequence of the fragment to the UniGene, dbEST, and nr databases at NCBI (GenBank release 123.0; see Table 5). In the BLAST algorithm, the expect value for an alignment is used as the measure of its significance. First, the cDNA sequences were compared to sequences in Unigene (http://www.ncbi.nlm.nih.gov/UniGene). If no alignments were found with an expect value less than 10⁻²⁵, the sequence was compared to the sequences in the dbEST database using BLASTN. If no alignments were found with an expect value less than 10⁻²⁵, the sequence was compared to sequences in the nr database.

[0435] The BLAST analysis produced the following categories of results: a) a significant match to a known or predicted human gene, b) a significant match to a nonhuman DNA sequence, such as vector DNA or E. coli DNA, c) a significant match to an unidentified GenBank entry (a sequence not previously identified or predicted to be an expressed sequence or a gene), such as a cDNA clone, mRNA, or cosmid, or d) no significant alignments. If a match to a known or predicted human gene was found, analysis of the known or predicted protein product was performed as described below. If a match to an unidentified GenBank entry was found, or if no significant alignments were found, the sequence was searched against all known sequences in the human genome database (http://www.ncbi.nlm.nih.gov/genome/seq/page.cgi?F=HsBlast.html&&ORG=Hs, see Table 5).

[0436] If many unknown sequences were to be analyzed with BLASTN, the clustering algorithm CAP2 (Contig Assembly Program, version 2) was used to cluster them into longer, contiguous sequences before performing a BLAST search of the human genome. Sequences that can be grouped into contigs are likely to be cDNA from expressed genes rather than vector DNA, E. coli DNA or human chromosomal DNA from a noncoding region, any of which could have been incorporated into the library. Clustered sequences provide a longer query sequence for database comparisons with BLASTN, increasing the probability of finding a significant match to a known gene. When a significant alignment was found, further analysis of the putative gene was performed, as described below. Otherwise, the sequence of the original cDNA fragment or the CAP2 contig is used to design a probe for expression analysis and further approaches are taken to identify the gene or predicted gene that corresponds to the cDNA sequence, including similarity searches of other databases, molecular cloning, and Rapid Amplification of cDNA Ends (RACE).

[0437] In some cases, the process of analyzing many unknown sequences with BLASTN was automated by using the BLAST network-client program blastcl3, which was downloaded from ftp://ncbi.nlm.nih.gov/blast/network/netblast.

[0438] When a cDNA sequence aligned to the sequence of one or more chromosomes, a large piece of the genomic region around the loci was used to predict the gene containing the cDNA. To do this, the contig corresponding to the mapped locus, as assembled by the RefSeq project at NCBI, was downloaded and cropped to include the region of alignment plus 100,000 bases preceding it and 100,000 bases following it on the chromosome. The result was a segment 200 kb in length, plus the length of the alignment. This segment, designated a putative gene, was analyzed using an exon prediction algorithm to determine whether the alignment area of the unknown sequence was contained within a region predicted to be transcribed (see Table 6).

[0439] This putative gene was characterized as follows: all of the exons comprising the putative gene and the introns between them were taken as a unit by noting the residue numbers on the 200 kb+segment that correspond to the first base of the first exon and the last base of the last exon, as given in the data returned by the exon prediction algorithm. The truncated sequence was compared to the UniGene, dbEST, and nr databases to search for alignments missed by searching with the initial fragment.

[0440] The predicted amino acid sequence of the gene was also analyzed. The peptide sequence of the gene predicted from the exons was used in conjunction with numerous software tools for protein analysis (see Table 7). These were used to classify or identify the peptide based on similarities to known proteins, as well as to predict physical, chemical, and biological properties of the peptides, including secondary and tertiary structure, flexibility, hydrophobicity, antigenicity (hydrophilicity), common domains and motifs, and localization within the cell or tissues. The peptide sequence was compared to protein databases, including SWISS-PROT, TrEMBL, GenPept, PDB, PIR, PROSITE, ProDom, PROSITE, Blocks, PRINTS, and Pfam, using BLASTP and other algorithms to determine similarities to known proteins or protein subunits.

### Example 5

### Further Sequence Analysis of Novel Clone 596H6

[0441] The sequence of clone 596H6 is provided below:

(SEQ ID NO: 8767)

| | |
|---|---|
| ACTATATTTA GGCACCACTG CCATAAACTA CCAAAAAAAA | 50 |
| AATGTAATTC | |
| CTAGAAGCTG TGAAGAATAG TAGTGTAGCT AAGCACGGTG | 100 |
| TGTGGACAGT | |
| GGGACATCTG CCACCTGCAG TAGGTCTCTG CACTCCCAAA | 150 |
| AGCAAATTAC | |
| ATTGGCTTGA ACTTCAGTAT GCCCGGTTCC ACCCTCCAGA | 200 |
| AACTTTTGTG | |
| TTCTTTGTAT AGAATTTAGG AACTTCTGAG GGCCACAAAT | 250 |
| ACACACATTA | |
| AAAAAGGTAG AATTTTTGAA GATAAGATTC TTCTAAAAAA | 300 |
| GCTTCCCAAT | |
| GCTTGAGTAG AAAGTATCAG TAGAGGTATC AAGGGAGGAG | 350 |
| AGACTAGGTG | |
| ACCACTAAAC TCCTTCAGAC TCTTAAAATT ACGATTCTTT | 400 |
| TCTCAAAGGG | |
| GAAGAACGTC AGTGCAGCGA TCCCTTCACC TTTAGCTAAA | 450 |
| GAATTGGACT | |
| GTGCTGCTCA AAATAAAGAT CAGTTGGAGG TANGATGTCC | 500 |
| AAGACTGAAG | |
| GTAAAGGACT AGTGCAAACT GAAAGTGATG GGGAAACAGA | 550 |
| CCTACGTATG | |
| GAAGCCATGT AGTGTTCTTC ACAGGCTGCT GTTGACTGAA | 600 |
| ATTCCTATCC | |
| TCAAATTACT CTAGACTGAA GCTGCTTCCC TTCAGTGAGC | 650 |
| AGCCTCTCCT | |
| TCCAAGATTC TGGAAAGCAC ACCTGACTCC AAACAAAGAC | 700 |
| TTAGAGCCCT | |
| GTGTCAGTGC TGCTGCTGCT TTTACCAGAT TCTCTAACCT | 750 |
| TCCGGGTAGA | |
| AGAG | |

[0442] This sequence was used as input for a series of BLASTN searches. First, it was used to search the UniGene database, build 132 (http://www.ncbi.nlm.nih.gov/BLAST/). No alignments were found with an expect value less than the threshold value of 10⁻²⁵. A BLASTN search of the database dbEST, release 041001, was then performed on the sequence and 21 alignments were found (http://www.ncbi.nlm.nih.gov/BLAST/). Ten of these had expect values less than 10⁻²⁵, but all were matches to unidentified cDNA clones. Next, the sequence was used to run a BLASTN search of the nr database, release 123.0. No significant alignment to any sequence in nr was found. Finally, a BLASTN search of the human genome was performed on the sequence (http://www.ncbi.nlm.nih.gov/genome/seq/page.cgi?F=HsBast.html&&ORG=Hs).

[0443] A single alignment to the genome was found on contig NT_{—}004698.3 (e=0.0). The region of alignment on the contig was from base 1,821,298 to base 1,822,054, and this region was found to be mapped to chromosome 1, from base 105,552,694 to base 105,553,450. The sequence containing the aligned region, plus 100 kilobases on each side of the aligned region, was downloaded. Specifically, the sequence of chromosome 1 from base 105,452,694 to 105,653,450 was downloaded (http://www.ncbi.nlm.nih.gov/cgi-bin/Entrez/seq_reg.cgi?chr=1&from=105452694&to=105653450).

[0444] This 200,757 bp segment of the chromosome was used to predict exons and their peptide products as follows. The sequence was used as input for the Genscan algorithm (http://genes.mit.edu/GENSCAN.html), using the following Genscan settings:

[0445] Organism: vertebrate

[0446] Suboptimal exon cutoff: 1.00 (no suboptimal exons)

[0447] Print options: Predicted CDS and peptides

[0448] The region matching the sequence of clone 596H6 was known to span base numbers 100,001 to 100,757 of the input sequence. An exon was predicted by the algorithm, with a probability of 0.695, covering bases 100,601 to 101,094 (designated exon 4.14 of the fourth predicted gene). This exon was part of a predicted cistron that is 24,195 bp in length. The sequence corresponding to the cistron was noted and saved separately from the 200,757 bp segment. BLASTN searches of the Unigene, dbEST, and nr databases were performed on it.

[0449] At least 100 significant alignments to various regions of the sequence were found in the dbEST database, although most appeared to be redundant representations of a few exons. All matches were to unnamed cDNAs and mRNAs (unnamed cDNAs and mRNAs are cDNAs and mRNAs not previously identified, or shown to correspond to a known or predicted human gene) from various tissue types. Most aligned to a single region on the sequence and spanned 500 bp or less, but several consisted of five or six regions separated by gaps, suggesting the locations of exons in the gene. Several significant matches to entries in the UniGene database were found, as well, even after masking low-complexity regions and short repeats in the sequence. All matches were to unnamed cDNA clones.

[0450] At least 100 significant alignments were found in the nr database, as well. A similarity to hypothetical protein FLJ22457 (UniGene cluster Hs.238707) was found (e=0.0). The cDNA of this predicted protein has been isolated from B lymphocytes (http://www.ncbi.nlm.nih.gov/entrez/viewer.cgi?save=0&cmd=&cfm=on&f=1&view=gp &txt=0&val=13637988).

[0451] Other significant alignments were to unnamed cDNAs and mRNAs.

[0452] Using Genscan, the following 730 residue peptide sequence was predicted from the putative gene:

SEQ ID NO: 8768

| | |
|---|---|
| MDGLGRRLRA SLRLKRGHGG HWRLNEMPYM KHEFDGGPPQ | 50 |
| DNSGEALKEP | |
| ERAQEHSLPN FAGGQHFFEY LLVVSLKKKR SEDDYEPIIT | 100 |
| YQFPKRENLL | |
| RGQQEEEERL LKAIPLFCFP DGNEWASLTE YPSLSCKTPG | 150 |
| LLAALVVEKA | |
| QPRTCCHASA PSAAPQARGP DAPSPAAGQA LPAGPGPRLP | 200 |
| KVYCIISCIG | |
| CFGLFSKILD EVEKRHQISM AVIYPFMQGL REAAFPAPGK | 250 |
| TVTLKSFIPD | |
| SGTEFISLTR PLDSHLEHVD FSSLLHCLSF EQILQIFASA | 300 |
| VLERKIIFLA | |
| EGLREEEKDV RDSTEVRGAG ECHGFQRKGN LGKQWGLCVE | 350 |
| DSVKMGDNQR | |
| GTSCSTLSQC IHAAAALLYP FSWAHTYIPV VPESLLATVC | 400 |
| CPTPFMVGVQ | |
| MRFQQEVMDS PMEEIQPQAE IKTVNPLGVY EERGPEKASL | 450 |
| CLFQVLLVNL | |
| CEGTFLMSVG DEKDILPPKL QDDILDSLGQ GINELKTAEQ | 500 |
| INEHVSGPFV | |
| QFFVKIVGHY ASYIKREANG QGHFQERSFC KALTSKTNRR | 550 |
| FVKKFVKTQL | |
| FSLFIQEAEK SKNPPAEVTQ VGNSSTCVVD TWLEAAATAL | 600 |
| SHHYNIFNTE | |
| HTLWSKGSAS LHEVCGHVRT RVKRKILFLY VSLAFTMGKS | 650 |
| IFLVENKAMN | |
| MTIKWTTSGR PGHGDMFGVI ESWGAAALLL LTGRVRDTGK | 700 |
| SSSSTGHRAS | |
| KSLVWSQVCF PESWEERLLT EGKQLQSRVI | |

[0453] Multiple analyses were performed using this prediction. First, a pairwise comparison of the sequence above and the sequence of FLJ22457, the hypothetical protein mentioned above, using BLASTP version 2.1.2 (http://ncbi.nlm.nih.gov/BLAST/), resulted in a match with an expect value of 0.0. The peptide sequence predicted from clone 596H6 was longer and 19% of the region of alignment between the two resulted from gaps in hypothetical protein FLJ22457. The cause of the discrepancy might be alternative mRNA splicing, alternative post-translational processing, or differences in the peptide-predicting algorithms used to create the two sequences, but the homology between the two is significant.

[0454] BLASTP and TBLASTN were also used to search for sequence similarities in the SWISS-PROT, TrEMBL, GenBank Translated, and PDB databases. Matches to several proteins were found, among them a tumor cell suppression protein, HTS 1. No matches aligned to the full length of the peptide sequence, however, suggesting that similarity is limited to a few regions of the peptide.

[0455] TBLASTN produced matches to several proteins—both identified and theoretical—but again, no matches aligned to the full length of the peptide sequence. The best alignment was to the same hypothetical protein found in GenBank before (FLJ22457).

[0456] To discover similarities to protein families, comparisons of the domains (described above) were carried out using the Pfam and Blocks databases. A search of the Pfam database identified two regions of the peptide domains as belonging the DENN protein family (e=2.1×10−⁻³³). The human DENN protein possesses an RGD cellular adhesion motif and a leucine-zipper-like motif associated with protein dimerization, and shows partial homology to the receptor binding domain of tumor necrosis factor alpha. DENN is virtually identical to MADD, a human MAP kinase-activating death domain protein that interacts with type I tumor necrosis factor receptor (http://srs.ebi.ac.uk/srs6bin/cgi-bin/wgetz?−id+fS5n1GQsHf+-e+[INTERPRO:‘IPR001194’]). The search of the Blocks database also revealed similarities between regions of the peptide sequence and known protein groups, but none with a satisfactory degree of confidence. In the Blocks scoring system, scores over 1,100 are likely to be relevant. The highest score of any match to the predicted peptide was 1,058.

[0457] The Prosite, ProDom, PRINTS databases (all publicly available) were used to conduct further domain and motif analysis. The Prosite search generated many recognized protein domains. A BLASTP search was performed to identify areas of similarity between the protein query sequence and PRINTS, a protein database of protein fingerprints, groups of motifs that together form a characteristic signature of a protein family. In this case, no groups were found to align closely to any section of the submitted sequence. The same was true when the ProDom database was searched with BLASTP.

[0458] A prediction of protein structure was done by performing a BLAST search of the sequence against PDB, a database in which every member has tertiary structure information. No significant alignments were found by this method. Secondary and super-secondary structure was examined using the Garnier algorithm. Although it is only considered to be 60-65% accurate, the algorithm provided information on the locations and lengths of alpha-helices, beta-sheets, turns and coils.

[0459] The antigenicity of the predicted peptide was modeled by graphing hydrophilicity vs. amino acid number. This produced a visual representation of trends in hydrophilicity along the sequence. Many locations in the sequence showed antigenicity and five sites had antigenicity greater than 2. This information can be used in the design of affinity reagents to the protein.

[0460] Membrane-spanning regions were predicted by graphing hydrophobicity vs. amino acid number. Thirteen regions were found to be somewhat hydrophobic. The algorithm TMpred predicted a model with 6 strong transmembrane helices (http://www.ch.embnet.org/software/

[0461] TMPRED_form.html).

[0462] NNPSL is a neural network algorithm developed by the Sanger Center. It uses amino acid composition and sequence to predict cellular location. For the peptide sequence submitted, its first choice was mitochondrial (51.1% expected accuracy). Its second choice was cytoplasmic (91.4% expected accuracy).

### Example 6

### Further Sequence Analysis of Novel Clone 486E11

[0463] The sequence of clone 486E11 is provided below:

SEQ ID NO: 8769

| | |
|---|---|
| TAAAAGCAGG CTGTGCACTA GGGACCTAGT GACCTTACTA | 50 |
| GAAAAAACTC | |
| AAATTCTCTG AGCCACAAGT CCTCATGGGC AAAATGTAGA | 100 |
| TACCACCACC | |
| TAACCCTGCC AATTTCCTAT CATTGTGACT ATCAAATTAA | 150 |
| ACCACAGGCA | |
| GGAAGTTGCC TTGAAAACTT TTTATAGTGT ATATTACTGT | 200 |
| TCACATAGAT | |
| NAGCAATTAA CTTTACATAT ACCCGTTTTT AAAAGATCAG | 250 |
| TCCTGTGATT | |
| AAAAGTCTGG CTGCCCTAAT TCACTTCGAT TATACATTAG | 300 |
| GTTAAAGCCA | |
| TATAAAAGAG GCACTACGTC TTCGGAGAGA TGAATGGATA | 350 |
| TTACAAGCAG | |
| TAATGTTGGC TTTGGAATAT ACACATAATG TCCACTTGAC | 400 |
| CTCATCTATT | |
| TGACACAAAA TGTAAACTAA ATTATGAGCA TCATTAGATA | 450 |
| CCTTGGCCTT | |
| TTCAAATCAC ACAGGGTCCT AGATCTNNNN NNNNNNNNNN | 500 |
| NNNNNNNNNN | |
| NNNNNNNNNN NNNNNNNNNN NNNNNNNNNN NNNNNNNNAC | 550 |
| TTTGGGATTC | |
| CTATATCTTT GTCAGCTGTC AACTTCAGTG TTTTCAGGTT | 600 |
| AAATTCTATC | |
| CATAGTCATC CCAATATACC TGCTTTAGAT GATACAACCT | 650 |
| TCAAAAGATC | |
| CGCTCTTCCT CGTAAAAAGT GGAG | |

[0464] The BLASTN program was used to compare the sequence to the UniGene and dbEST databases. No significant alignments were found in either. It was then searched against the nr database and only alignments to unnamed genomic DNA clones were found.

[0465] CAP2 was used to cluster a group of unknowns, including clone 486E11. The sequence for 486E11 was found to overlap others. These formed a contig of 1,010 residues, which is shown below:

SEQ ID NO: 8832

| | |
|---|---|
| CGGACAGGTA CCTAAAAGCA GGCTGTGCAC TAGGGACCTA | 50 |
| GTGACCTTAC | |
| TAGAAAAAAC TCAAATTCTC TGAGCCACAA GTCCTCATGG | 100 |
| GCAAAATGTA | |
| GATACCACCA CCTAACCCTG CCAATTTCCT ATCATTGTGA | 150 |
| CTATCAAATT | |
| AAACCACAGG CAGGAAGTTG CCTTGAAAAC TTTTTATAGT | 200 |
| GTATATTACT | |
| GTTCACATAG ATNAGCAATT AACTTTACAT ATACCCGTTT | 250 |
| TTAAAAGATC | |
| AGTCCTGTGA TTAAAAGTCT GGCTGCCCTA ATTCACTTCG | 300 |
| ATTATACATT | |
| AGGTTAAAGC CATATAAAAG AGGCACTACG TCTTCGGAGA | 350 |
| GATGAATGGA | |
| TATTACAAGC AGTAATTTTG GCTTTGGAAT ATACACATAA | 400 |
| TGTCCACTTG | |
| ACCTCATCTA TTTGACACAA AATGTAAACT AAATTATGAG | 450 |
| CATCATTAGA | |
| TACCTTGGGC CTTTTCAAAT CACACAGGGT CCTAGATCTG | 500 |
| NNNNNNNNNN | |
| NNNNNNNNNN NNNNNNNNNN NNNNNNNNNN NNNNNNNNNN | 550 |
| NNNNNNNNNN | |
| NACTTTGGAT TCTTATATCT TTGTCAGCTG TCAACTTCAG | 600 |
| TGTTTTCAGG | |
| NTAAATTCTA TCCATAGTCA TCCCAATATA CCTGCTTTAG | 650 |
| ATGATACAAA | |
| CTTCAAAAGA TCCGGCTCTC CCTCGTAAAA CGTGGAGGAC | 700 |
| AGACATCAAG | |
| GGGGTTTTCT GAGTAAAGAA AGGCAACCGC TCGGCAAAAA | 750 |
| CTCACCCTGG | |
| CACAACAGGA NCGAATATAT ACAGACGCTG ATTGAGCGTT | 800 |
| TTGCTCCATC | |
| TTCACTTCTG TTAAATGAAG ACATTGATAT CTAAAATGCT | 850 |
| ATGAGTCTAA | |
| CTTTGTAAAA TTAAAATAGA TTTGTAGTTA TTTTTCAAAA | 900 |
| TGAAATCGAA | |
| AAGATACAAG TTTTGAAGGC AGTCTCTTTT TCCACCCTGC | 950 |
| CCCTCTAGTG | |
| TGTTTTACAC ACTTCTCTGG CCACTCCAAC AGGGAAGCTG | 1000 |
| GTCCAGGGCC | |
| ATTATACAGG | |

[0466] The sequence of the CAP2 contig was used in a BLAST search of the human genome. 934 out of 1,010 residues aligned to a region of chromosome 21. A gap of 61 residues divided the aligned region into two smaller fragments. The sequence of this region, plus 100 kilobases on each side of it, was downloaded and analyzed using the Genscan site at MIT (http://genes.mit.edu/GENSCAN.html), with the following settings:

[0467] Organism: vertebrate

[0468] Suboptimal exon cutoff: 1.00 (no suboptimal exons)

[0469] Print options: Predicted CDS and peptides

[0470] The fragment was found to fall within one of several predicted genes in the chromosome region. The bases corresponding to the predicted gene, including its predicted introns, were saved as a separate file and used to search GenBank again with BLASTN to find any ESTs or UniGene clusters identified by portions of the sequence not included in the original unknown fragment. The nr database contained no significant matches. At least 100 significant matches to various parts of the predicted gene were found in the dbEST database, but all of them were to unnamed cDNA clones. Comparison to UniGene produced fewer significant matches, but all matches were to unnamed cDNAs.

[0471] The peptide sequence predicted by Genscan was also saved. Multiple types of analyses were performed on it using the resources mentioned in Table 3. BLASTP and TBLASTN were used to search the TrEMBL protein database (http://www.expasy.ch/sprot/) and the GenBank nr database (http://www.ncbi.nlm.hih.gov/BLAST/), which includes data from the SwissProt, PIR, PRF, and PDB databases. No significant matches were found in any of these, so no gene identity or tertiary structure was discovered.

[0472] The peptide sequence was also searched for similarity to known domains and motifs using BLASTP with the Prosite, Blocks, Pfam, and ProDom databases. The searches produced no significant alignments to known domains. BLASTP comparison to the PRINTS database produced an alignment to the P450 protein family, but with a low probability of accuracy (e=6.9).

[0473] Two methods were used to predict secondary structure—the Garnier/Osguthorpe/Robson model and the Chou-Fasman model. The two methods differed somewhat in their results, but both produced representations of the peptide sequence with helical and sheet regions and locations of turns.

[0474] Antigenicity was plotted as a graph with amino acid number in the sequence on the x-axis and hydrophilicity on the y-axis. Several areas of antigenicity were observed, but only one with antigenicity greater than 2. Hydrophobicity was plotted in the same way. Only one region, from approximately residue 135 to residue 150, had notable hydrophobicity. TMpred, accessed through ExPASy, was used to predict transmembrane helices. No regions of the peptide sequence were predicted with reasonable confidence to be membrane-spanning helices.

[0475] NNPSL predicted that the putative protein would be found either in the nucleus (expected prediction accuracy=51.1%) or secreted from the cell (expected prediction accuracy=91.4%).

### Example 7

### Preparation of a Leukocyte cDNA Array Comprising a Candidate Gene Library

[0476] Candidate genes and gene sequences for leukocyte expression profiling were identified through methods described elsewhere in this document. Candidate genes are used to obtain or design probes for peripheral leukocyte expression profiling in a variety of ways.

[0477] A cDNA microarray carrying 384 probes was constructed using sequences selected from the cDNA libraries described in example 1. cDNAs were selected from T-cell libraries, PBMC libraries and buffy coat libraries. A listing of the cDNA fragments used is given in Table 8.

[0478] 96-Well PCR

[0479] Plasmids were isolated in 96-well format and PCR was performed in 96-well format. A master mix was made that contain the reaction buffer, dNTPs, forward and reverse primer and DNA polymerase was made. 99 ul of the master mix was aliquoted into 96-well plate. 1 ul of plasmid (1-2 ng/ul) of plasmid was added to the plate. The final reaction concentration was 10 mM Tris pH 8.3, 3.5 mM MgCl2, 25 mM KCl, 0.4 mM dNTPs, 0.4 uM M13 forward primer, 0.4 M13 reverse primer, and 10 U of Taq Gold (Applied Biosystems). The PCR conditions were:

[0480] Step 1 95 C for 10 min

[0481] Step 2 95 C for 15 sec

[0482] Step 3 56 C for 30 sec

[0483] Step 4 72 C for 2 min 15 seconds

[0484] Step 5 go to Step 2 39 times

[0485] Step 6 72 C for 10 minutes

[0486] Step 7 4 C for ever.

[0487] PCR Purification

[0488] PCR purification was done in a 96-well format. The Arraylt (Telechem International, Inc.) PCR purification kit was used and the provided protocol was followed without modification. Before the sample was evaporated to dryness, the concentration of PCR products was determined using a spectrophotometer. After evaporation, the samples were re-suspended in 1× Micro Spotting Solution (Arraylt) so that the majority of the samples were between 0.2-1.0 ug/ul.

[0489] Array Fabrication

[0490] Spotted cDNA microarrays were then made from these PCR products by Arraylt using their protocols (http://arrayit.com/Custom_Microarrays/Flex-Chips/flex-chips.html). Each fragment was spotted 3 times onto each array.

[0491] Candidate genes and gene sequences for leukocyte expression profiling were identified through methods described elsewhere in this document. Those candidate genes are used for peripheral leukocyte expression profiling. The candidate libraries can used to obtain or design probes for expression profiling in a variety of ways.

[0492] Oligonucleotide probes are also prepared using the DNA sequence information for the candidate genes identified by differential hybridization screening (listed in Table 3 and the sequence listing) and/or the sequence information for the genes identified by database mining (listed in Table 2) is used to design complimentary oligonucleotide probes. Oligo probes are designed on a contract basis by various companies (for example, Compugen, Mergen, Affymetrix, Telechem), or designed from the candidate sequences using a variety of parameters and algorithms as indicated at http://www.genome.wi.mit.edu/cgi-bin/primer/primer3.cgi. Briefly, the length of the oligonucleotide to be synthesized is determined, preferably greater than 18 nucleotides, generally 18-24 nucleotides, 24-70 nucleotides and, in some circumstances, more than 70 nucleotides. The sequence analysis algorithms and tools described above are applied to the sequences to mask repetitive elements, vector sequences and low complexity sequences. Oligonucleotides are selected that are specific to the candidate nucleotide sequence (based on a Blast n search of the oligonucleotide sequence in question against gene sequences databases, such as the Human Genome Sequence, UniGene, dbEST or the non-redundant database at NCBI), and have <50% G content and 25-70% G+C content. Desired oligonucleotides are synthesized using well-known methods and apparatus, or ordered from a company (for example Sigma). Oligonucleotides are spotted onto microarrays. Alternatively, oligonucleotides are synthesized directly on the array surface, using a variety of techniques (Hughes et al. 2001, Yershov et al. 1996, Lockhart et al 1996).

### Example 8

### Preparation of RNA from Mononuclear Cells for Expression Profiling

[0493] Blood was isolated from the subject for leukocyte expression profiling using the following methods:

[0494] Two tubes were drawn per patient. Blood was drawn from either a standard peripheral venous blood draw or directly from a large-bore intra-arterial or intravenous catheter inserted in the femoral artery, femoral vein, subclavian vein or internal jugular vein. Care was taken to avoid sample contamination with heparin from the intravascular catheters, as heparin can interfere with subsequent RNA reactions.

[0495] For each tube, 8 ml of whole blood was drawn into a tube (CPT, Becton-Dickinson order #362753) containing the anticoagulant Citrate, 25° C. density gradient solution (e.g. Ficoll, Percoll) and a polyester gel barrier that upon centrifugation was permeable to RBCs and granulocytes but not to mononuclear cells. The tube was inverted several times to mix the blood with the anticoagulant. The tubes were centrifuged at 1750×g in a swing-out rotor at room temperature for 20 minutes. The tubes were removed from the centrifuge and inverted 5-10 times to mix the plasma with the mononuclear cells, while trapping the RBCs and the granulocytes beneath the gel barrier. The plasma/mononuclear cell mix was decanted into a 15 ml tube and 5 ml of phosphate-buffered saline (PBS) is added. The 15 ml tubes were spun for 5 minutes at 1750×g to pellet the cells. The supernatant was discarded and 1.8 ml of RLT lysis buffer is added to the mononuclear cell pellet. The buffer and cells were pipetted up and down to ensure complete lysis of the pellet. The cell lysate was frozen and stored until it is convenient to proceed with isolation of total RNA.

[0496] Total RNA was purified from the lysed mononuclear cells using the Qiagen Rneasy Miniprep kit, as directed by the manufacturer (10/99 version) for total RNA isolation, including homogenization (Qiashredder columns) and on-column DNase treatment. The purified RNA was eluted in 50 ul of water. The further use of RNA prepared by this method is described in Example 11, 24, and 23.

[0497] Some samples were prepared by a different protocol, as follows:

[0498] Two 8 ml blood samples were drawn from a peripheral vein into a tube (CPT, Becton-Dickinson order #362753) containing anticoagulant (Citrate), 25° C. density gradient solution (Ficoll) and a polyester gel barrier that upon centrifugation is permeable to RBCs and granulocytes but not to mononuclear cells. The mononuclear cells and plasma remained above the barrier while the RBCs and granulocytes were trapped below. The tube was inverted several times to mix the blood with the anticoagulant, and the tubes were subjected to centrifugation at 1750×g in a swing-out rotor at room temperature for 20 min. The tubes were removed from the centrifuge, and the clear plasma layer above the cloudy mononuclear cell layer was aspirated and discarded. The cloudy mononuclear cell layer was aspirated, with care taken to rinse all of the mononuclear cells from the surface of the gel barrier with PBS (phosphate buffered saline). Approximately 2 mls of mononuclear cell suspension was transferred to a 2 ml microcentrifuge tube, and centrifuged for 3 min. at 16,000 rpm in a microcentrifuge to pellet the cells. The supernatant was discarded and 1.8 ml of RLT lysis buffer (Qiagen) were added to the mononuclear cell pellet, which lysed the cells and inactivated Rnases. The cells and lysis buffer were pipetted up and down to ensure complete lysis of the pellet. Cell lysate was frozen and stored until it was convenient to proceed with isolation of total RNA.

[0499] RNA samples were isolated from 8 mL of whole blood. Yields ranged from 2 ug to 20 ug total RNA for 8 mL blood. A260/A280 spectrophotometric ratios were between 1.6 and 2.0, indicating purity of sample. 2 ul of each sample were run on an agarose gel in the presence of ethidium bromide. No degradation of the RNA sample and no DNA contamination was visible.

### Example 9

### Preparation of Buffy Coat Control RNA for Use in Leukocyte Expression Profiling

[0500] Control RNA was prepared using total RNA from Buffy coats and/or total RNA from enriched mononuclear cells isolated from Buffy coats, both with and without stimulation with ionomycin and PMA. The following control RNAs were prepared:

[0501] Control 1: Buffy Coat Total RNA

[0502] Control 2: Mononuclear cell Total RNA

[0503] Control 3: Stimulated buffy coat Total RNA

[0504] Control 4: Stimulated mononuclear Total RNA

[0505] Control 5: 50% Buffy coat Total RNA/50% Stimulated buffy coat Total RNA

[0506] Control 6: 50% Mononuclear cell Total RNA/50% Stimulated Mononuclear Total RNA

[0507] Some samples were prepared using the following protocol: Buffy coats from 38 individuals were obtained from Stanford Blood Center. Each buffy coat is derived from ˜350 mL whole blood from one individual. 10 ml buffy coat was removed from the bag, and placed into a 50 ml tube. 40 ml of Buffer EL (Qiagen) was added, the tube was mixed and placed on ice for 15 minutes, then cells were pelleted by centrifugation at 2000×g for 10 minutes at 4° C. The supernatant was decanted and the cell pellet was re-suspended in 10 ml of Qiagen Buffer EL. The tube was then centrifuged at 2000×g for 10 minutes at 4° C. The cell pellet was then re-suspended in 20 ml TRIZOL (GibcoBRL) per Buffy coat sample, the mixture was shredded using a rotary homogenizer, and the lysate was then frozen at −80° C. prior to proceeding to RNA isolation.

[0508] Other control RNAs were prepared from enriched mononuclear cells prepared from Buffy coats. Buffy coats from Stanford Blood Center were obtained, as described above. 10 ml buffy coat was added to a 50 ml polypropylene tube, and 10 ml of phosphate buffer saline (PBS) was added to each tube. A polysucrose (5.7 g/dL) and sodium diatrizoate (9.0 g/dL) solution at a 1.077+/−0.0001 g/ml density solution of equal volume to diluted sample was prepared (Histopaque 1077, Sigma cat. no 1077-1). This and all subsequent steps were performed at room temperature. 15 ml of diluted buffy coat/PBS was layered on top of 15 ml of the histopaque solution in a 50 ml tube. The tube was centrifuged at 400×g for 30 minutes at room temperature. After centrifugation, the upper layer of the solution to within 0.5 cm of the opaque interface containing the mononuclear cells was discarded. The opaque interface was transferred into a clean centrifuge tube. An equal volume of PBS was added to each tube and centrifuged at 350×g for 10 minutes at room temperature. The supernatant was discarded. 5 ml of Buffer EL (Qiagen) was used to resuspend the remaining cell pellet and the tube was centrifuged at 2000×g for 10 minutes at room temperature. The supernatant was discarded. The pellet was resuspended in 20 ml of TRIZOL (GibcoBRL) for each individual buffy coat that was processed. The sample was homogenized using a rotary homogenizer and frozen at −80 C until RNA was isolated.

[0509] RNA was isolated from frozen lysed Buffy coat samples as follows: frozen samples were thawed, and 4 ml of chloroform was added to each buffy coat sample. The sample was mixed by vortexing and centrifuged at 2000×g for 5 minutes. The aqueous layer was moved to new tube and then repurified by using the RNeasy Maxi RNA clean up kit, according to the manufacturer's instruction (Qiagen, PN 75162). The yield, purity and integrity were assessed by spectrophotometer and gel electrophoresis.

[0510] Some samples were prepared by a different protocol, as follows. The further use of RNA prepared using this protocol is described in Example 11.

[0511] whole blood samples were randomly selected from consented blood donors at the Stanford Medical School Blood Center. Each buffy coat sample was produced from ˜350 mL of an individual's donated blood. The whole blood sample was centrifuged at ˜4,400×g for 8 minutes at room temperature, resulting in three distinct layers: a top layer of plasma, a second layer of buffy coat, and a third layer of red blood cells. 25 ml of the buffy coat fraction was obtained and diluted with an equal volume of PBS (phosphate buffered saline). 30 ml of diluted buffy coat was layered onto 15 ml of sodium diatrizoate solution adjusted to a density of 1.077+/−0.001 g/ml (Histopaque 1077, Sigma) in a 50 mL plastic tube. The tube was spun at 800 g for 10 minutes at room temperature. The plasma layer was removed to the 30 ml mark on the tube, and the mononuclear cell layer removed into a new tube and washed with an equal volume of PBS, and collected by centrifugation at 2000 g for 10 minutes at room temperature. The cell pellet was resuspended in 10 ml of Buffer EL (Qiagen) by vortexing and incubated on ice for 10 minutes to remove any remaining erthythrocytes. The mononuclear cells were spun at 2000 g for 10 minutes at 4 degrees Celsius. The cell pellet was lysed in 25 ml of a phenol/guanidinium thiocyanate solution (TRIZOL Reagent, Invitrogen). The sample was homogenized using a PowerGene 5 rotary homogenizer (Fisher Scientific) and Omini disposable generator probes (Fisher Scientific). The Trizol lysate was frozen at −80 degrees C. until the next step.

[0512] The samples were thawed out and incubated at room temperature for 5 minutes. 5 ml chloroform was added to each sample, mixed by vortexing, and incubated at room temperature for 3 minutes. The aqueous layers were transferred to new 50 ml tubes. The aqueous layer containing total RNA was further purified using the Qiagen RNeasy Maxi kit (PN 75162), per the manufacturer's protocol (October 1999). The columns were eluted twice with 1 ml Rnase-free water, with a minute incubation before each spin. Quantity and quality of RNA was assessed using standard methods. Generally, RNA was isolated from batches of 10 buffy coats at a time, with an average yield per buffy coat of 870 μg, and an estimated total yield of 43.5 mg total RNA with a 260/280 ratio of 1.56 and a 28S/18S ratio of 1.78.

[0513] Quality of the RNA was tested using the Agilent 2100 Bioanalyzer using RNA 6000 microfluidics chips. Analysis of the electrophorgrams from the Bioanalyzer for five different batches demonstrated the reproducibility in quality between the batches.

[0514] Total RNA from all five batches were combined and mixed in a 50 ml tube, then aliquoted as follows: 2×10 ml aliquots in 15 ml tubes, and the rest in 100 μl aliquots in 1.5 ml microcentrifuge tubes. The aliquots gave highly reproducible results with respect to RNA purity, size and integrity. The RNA was stored at −80° C.

[0515] Test Hybridization of Reference RNA

[0516] The reference RNA (hereinafter, “R50”) was hybridized to a spotted cDNA array (prepared as described in Example 10). There are a total of 1152 features on the array: 384 clones printed in triplicate. The R50 targets were fluorescently labeled with Cy-5 using methods described herein. In five array hybridizations, the reference RNA detected 94% of probes on the array with a Signal to Noise ratio of greater than three. 99% of probes on the array were detected with a signal to noise ratio of greater than one. FIG. 8 shows one array hybridization. The probes are ordered from high to low in signal to noise ratio, and the log of median and the log of the background were plotted for each probe.

### Example 10

### RNA Labeling and Hybridization to a Leukocyte cDNA Array of Candidate Nucleotide Sequences

[0517] Comparison of Guanine-Silica to Acid-Phenol RNA Purification (GSvsAP)

[0518] These data are from a set of 12 hybridizations designed to identify differences between the signal strength from two different RNA purification methods. The two RNA methods used were guanidine-silica (GS, Qiagen) and acid-phenol (AP, Trizol, Gibco BRL). Ten tubes of blood were drawn from each of four people. Two were used for the AP prep, the other eight were used for the GS prep. The protocols for the leukocyte RNA preps using the AP and GS techniques were completed as described here:

[0519] Guanidine-Silica (GS) Method:

[0520] For each tube, 8 ml blood was drawn into a tube containing the anticoagulant Citrate, 25° C. density gradient solution and a polyester gel barrier that upon centrifugation is permeable to RBCs and granulocytes but not to mononuclear cells. The mononuclear cells and plasma remained above the barrier while the RBCs and granulocytes were trapped below. CPT tubes from Becton-Dickinson (#362753) were used for this purpose. The tube was inverted several times to mix the blood with the anticoagulant. The tubes were immediately centrifuged @1750×g in a swinging bucket rotor at room temperature for 20 min. The tubes were removed from the centrifuge and inverted 5-10 times. This mixed the plasma with the mononuclear cells, while the RBCs and the granulocytes remained trapped beneath the gel barrier. The plasma/mononuclear cell mix was decanted into a 15 ml tube and 5 ml of phosphate-buffered saline (PBS) was added. The 15 ml tubes are spun for 5 minutes at 1750×g to pellet the cells. The supernatant was discarded and 1.8 ml of RLT lysis buffer (guanidine isothyocyanate) was added to the mononuclear cell pellet. The buffer and cells were pipetted up and down to ensure complete lysis of the pellet. The cell lysate was then processed exactly as described in the Qiagen Rneasy Miniprep kit protocol (10/99 version) for total RNA isolation (including steps for homogenization (Qiashredder columns) and on-column DNase treatment. The purified RNA was eluted in 50 ul of water.

[0521] Acid-Phenol (AP) Method:

[0522] For each tube, 8 ml blood was drawn into a tube containing the anticoagulant Citrate, 25° C. density gradient solution and a polyester gel barrier that upon centrifugation is permeable to RBCs and granulocytes but not to mononuclear cells. The mononuclear cells and plasma remained above the barrier while the RBCs and granulocytes were trapped below. CPT tubes from Becton-Dickinson (#362753) were used for this purpose. The tube was inverted several times to mix the blood with the anticoagulant. The tubes were immediately centrifuged @1750×g in a swinging bucket rotor at room temperature for 20 min. The tubes were removed from the centrifuge and inverted 5-10 times. This mixed the plasma with the mononuclear cells, while the RBCs and the granulocytes remained trapped beneath the gel barrier. The plasma/mononuclear cell mix was decanted into a 15 ml tube and 5 ml of phosphate-buffered saline (PBS) was added. The 15 ml tubes are spun for 5 minutes @1750×g to pellet the cells. The supernatant was discarded and the cell pellet was lysed using 0.6 mL Phenol/guanidine isothyocyanate (e.g. Trizol reagent, GibcoBRL). Subsequent total RNA isolation proceeded using the manufacturers protocol.

[0523] RNA from each person was labeled with either Cy3 or Cy5, and then hybridized in pairs to the mini-array. For instance, the first array was hybridized with GS RNA from one person (Cy3) and GS RNA from a second person (Cy5).

[0524] Techniques for labeling and hybridization for all experiments discussed here were completed as detailed above in example 10. Arrays were prepared as described in example 7.

[0525] RNA isolated from subject samples, or control Buffy coat RNA, were labeled for hybridization to a cDNA array. Total RNA (up to 100 μg) was combined with 2 μl of 100 μM solution of an Oligo (dT) 12-18 (GibcoBRL) and heated to 70° C. for 10 minutes and place on ice. Reaction buffer was added to the tube, to a final concentration of 1×RT buffer (GibcoBRL), 10 mM DTT (GibcoBRL), 0.1 mM unlabeled dATP, dTTP, and dGTP, and 0.025 mM unlabeled dCTP, 200 pg of CAB (A. thaliana photosystem I chlorophyll a/b binding protein), 200 pg of RCA (A. thaliana RUBISCO activase), 0.25 mM of Cy-3 or Cy-5 dCTP, and 400 U Superscript II RT (GibcoBRL).

[0526] The volumes of each component of the labeling reaction were as follows: 20 μl of 5×RT buffer; 10 μl of 100 mM DTT; 1 μl of 10 mM dNTPs without dCTP; 0.5 μl of 5 mM CTP; 13 μl of H20; 0.02 μl of 10 ng/l CAB and RCA; 1 μl of 40 Units/μl RNAseOUT Recombinatnt Ribonuclease Inhibitor (GibcoBRL); 2.5 μl of 1.0 mM Cy-3 or Cy-5 dCTP; and 2.0 μl of 200 Units/μl of Superscript II RT. The sample was vortexed and centrifuged. The sample was incubated at 4° C. for 1 hour for first strand cDNA synthesis, then heated at 70° C. for 10 minutes to quench enzymatic activity. 1 μl of 10 mg/ml of Rnase A was added to degrade the RNA strand, and the sample was incubated at 37° C. for 30 minutes.

[0527] Next, the Cy-3 and Cy-5 cDNA samples were combined into one tube. Unincorporated nucleotides were removed using QlAquick RCR purification protocol (Qiagen), as directed by the manufacturer. The sample was evaporated to dryness and resuspended in 5 μl of water. The sample was mixed with hybridization buffer containing 5×SSC, 0.2% SDS, 2 mg/ml Cot-1 DNA (GibcoBRL), 1 mg/ml yeast tRNA (GibcoBRL), and 1.6 ng/μl poly dA40-60 (Pharmacia). This mixture was placed on the microarray surface and a glass cover slip was placed on the array (Corning). The microarray glass slide was placed into a hybridization chamber (ArrrayIt). The chamber was then submerged in a water bath overnight at 62° C. The microarray was removed from the cassette and the cover slip was removed by repeatedly submerging it to a wash buffer containing 1×SSC, and 0.1% SDS. The microarray slide was washed in 1×SSC/0.1% SDS for 5 minutes. The slide was then washed in 0.1% SSC/0.1% SDS for 5 minutes. The slide was finally washed in 0.1×SSC for 2 minutes. The slide was spun at 1000 rpm for 2 minutes to dry out the slide, then scanned on a microarray scanner (Axon Instruments, Union City, Calif.).

[0528] Six hybridizations with 20 μg of RNA were performed for each type of RNA preparation (GS or AP). Since both the Cy3 and the Cy5 labeled RNA are from test preparations, there are six data points for each GS prepped, Cy3-labeled RNA and six for each GS-prepped, Cy5-labeled RNA. The mini array hybridizations were scanned on and Axon Instruments scanner using GenPix 3.0 software. The data presented were derived as follows. First, all features flagged as “not found” by the software were removed from the dataset for individual hybridizations. These features are usually due to high local background or other processing artifacts. Second, the median fluorescence intensity minus the background fluorescence intensity was used to calculate the mean background subtracted signal for each dye for each hybridization. In FIG. 4, the mean of these means across all six hybridizations is graphed (n=6 for each column). The error bars are the SEM. This experiment shows that the average signal from AP prepared RNA is 47% of the average signal from GS prepared RNA for both Cy3 and Cy5.

[0529] Generation of Expression Data for Leukocyte Genes from Peripheral Leukocyte Samples

[0530] Six hybridizations were performed with RNA purified from human blood leukocytes using the protocols given above. Four of the six were prepared using the GS method and 2 were prepared using the AP method. Each preparation of leukocyte RNA was labeled with Cy3 and 10 μg hybridized to the mini-array. A control RNA was batch labeled with Cy5 and 10 μg hybridized to each mini-array together with the Cy3-labeled experimental RNA.

[0531] The control RNA used for these experiments was Control 1: Buffy Coat RNA, as described above. The protocol for the preparation of that RNA is reproduced here:

[0532] Buffy Coat RNA Isolation:

[0533] Buffy coats were obtained from Stanford Blood Center (in total 38 individual buffy coats were used. Each buffy coat is derived from ˜350 mL whole blood from one individual. 10 ml buffy coat was taken and placed into a 50 ml tube and 40 ml of a hypoclorous acid (HOCl) solution (Buffer EL from Qiagen) was added. The tube was mixed and placed on ice for 15 minutes. The tube was then centrifuged at 2000×g for 10 minutes at 4° C. The supernatant was decanted and the cell pellet was re-suspended in 10 ml of hypochlorous acid solution (Qiagen Buffer EL). The tube was then centrifuged at 2000×g for 10 minutes at 4° C. The cell pellet was then re-suspended in 20 ml phenol/guanidine thiocyanate solution (TRIZOL from GibcoBRL) for each individual buffy coat that was processed. The mixture was then shredded using a rotary homogenizer. The lysate was then frozen at −80° C. prior to proceeding to RNA isolation.

[0534] The arrays were then scanned and analyzed on an Axon Instruments scanner using GenePix 3.0 software. The data presented were derived as follows. First, all features flagged as “not found” by the software were removed from the dataset for individual hybridizations. Second, control features were used to normalize the data for labeling and hybridization variability within the experiment. The control features are cDNA for genes from the plant, Arabidopsis thaliana, that were included when spotting the mini-array. Equal amounts of RNA complementary to two of these cDNAs were added to each of the samples before they were labeled. A third was pre-labeled and equal amounts were added to each hybridization solution before hybridization. Using the signal from these genes, we derived a normalization constant (Lj) according to the following formula:

$${L}_{j} = \frac{\frac{{\sum }_{i = 1}^{N} {BGSS}_{j , i}}{N}}{\frac{{\sum }_{j = 1}^{K} \frac{{\sum }_{i = 1}^{N} {BGSS}_{J , i}}{N}}{K} }$$

where BGSSᵢ is the signal for a specific feature as identified in the GenePix software as the median background subtracted signal for that feature, N is the number of A. thaliana control features, K is the number of hybridizations, and L is the normalization constant for each individual hybridization.

[0535] Using the formula above, the mean over all control features of a particular hybridization and dye (eg Cy3) was calculated. Then these control feature means for all Cy3 hybridizations were averaged. The control feature mean in one hybridization divided by the average of all hybridizations gives a normalization constant for that particular Cy3 hybridization.

[0536] The same normalization steps were performed for Cy3 and Cy5 values, both fluorescence and background. Once normalized, the background Cy3 fluorescence was subtracted from the Cy3 fluorescence for each feature. Values less than 100 were eliminated from further calculations since low values caused spurious results.

[0537] FIG. 5 shows the average background subtracted signal for each of nine leukocyte-specific genes on the mini array. This average is for 3-6 of the above-described hybridizations for each gene. The error bars are the SEM. FIG. 3: The ratio of Cy3 to Cy5 signal is shown for a number of genes. This ratio corrects for variability among hybridizations and allows comparison between experiments done at different times. The ratio is calculated as the Cy3 background subtracted signal divided by the Cy5 background subtracted signal. Each bar is the average for 3-6 hybridizations. The error bars are SEM.

[0538] Together, these results show that we can measure expression levels for genes that are expressed specifically in sub-populations of leukocytes. These expression measurements were made with only 10 μg of leukocyte total RNA that was labeled directly by reverse transcription. The signal strength can be increased by improved labeling techniques that amplify either the starting RNA or the signal fluorescence. In addition, scanning techniques with higher sensitivity can be used. Genes in FIGS. 5 and 6:

| | GenBank | |
|---|---|---|
| | Accession | Gene Name |
| Gene Name/Description | Number | Abbreviation |
| T cell-specific tyrosine kinase Mrna | L10717 | TKTCS |
| Interleukin 1 alpha (IL 1) mRNA, complete | NM_000575 | IL1A |
| cds | | |
| T-cell surface antigen CD2 (T11) mRNA, | M14362 | CD2 |
| complete cds | | |
| Interleukin-13 (IL-13) precursor gene, | U31120 | IL-13 |
| complete cds | | |
| Thymocyte antigen CD1a mRNA, complete | M28825 | CD1a |
| cds | | |
| CD6 mRNA for T cell glycoprotein CDS | NM_006725 | CD6 |
| MHC class II HLA-DQA1 mRNA, complete | U77589 | HLA-DQA1 |
| cds | | |
| Granulocyte colony-stimulating factor | M28170 | CD19 |
| Homo sapiens CD69 antigen | NM_001781 | CD69 |

### Example 11

### Identification of Diagnostic Gene Sets Useful in Diagnosis and Treatment of Cardiac Allograft Rejection

[0539] An observational study was conducted in which a prospective cohort of cardiac transplant recipients were analyzed for associations between clinical events or rejection grades and expression of a leukocyte candidate nucleotide sequence library. Patients were identified at 4 cardiac transplantation centers while on the transplant waiting list or during their routing post-transplant care. All adult cardiac transplant recipients (new or re-transplants) who received an organ at the study center during the study period or within 3 months of the start of the study period were eligible. The first year after transplantation is the time when most acute rejection occurs and it is thus important to study patients during this period. Patients provided informed consent prior to study procedures.

[0540] Peripheral blood leukocyte samples were obtained from all patients at the following time points: prior to transplant surgery (when able), the same day as routinely scheduled screening biopsies, upon evaluation for suspected acute rejection (urgent biopsies), on hospitalization for an acute complication of transplantation or immunosuppression, and when Cytomegalovirus (CMV) infection was suspected or confirmed. Samples were obtained through a standard peripheral vein blood draw or through a catheter placed for patient care (for example, a central venous catheter placed for endocardial biopsy). When blood was drawn from a intravenous line, care was taken to avoid obtaining heparin with the sample as it can interfere with downstream reactions involving the RNA. Mononuclear cells were prepared from whole blood samples as described in Example 8. Samples were processed within 2 hours of the blood draw and DNA and serum were saved in addition to RNA. Samples were stored at −70° C. or on dry ice and sent to the site of RNA preparation in a sealed container with ample dry ice. RNA was isolated from subject samples as described in Example 8 and hybridized to a candidate library of differentially expressed leukocyte nucleotide sequences, as further described in Examples 20-22. Methods used for amplification, labeling, hybridization and scanning are described in example 23. Analysis of human transplant patient mononuclear cell RNA hybridized to a microarray is shown in Example 24.

[0541] From each patient, clinical information was obtained at the following time points: prior to transplant surgery (when available), the same day as routinely scheduled screening biopsies, upon evaluation for suspected acute rejection (e.g., urgent biopsies), on hospitalization for an acute complication of transplantation or immunosuppression, and when Cytomegalovirus (CMV) infection was suspected or confirmed. Data was collected directly from the patient, from the patient's medical record, from diagnostic test reports or from computerized hospital databases. It was important to collect all information pertaining to the study clinical correlates (diagnoses and patient events and states to which expression data is correlated) and confounding variables (diagnoses and patient events and states that may result in altered leukocyte gene expression. Examples of clinical data collected are: patient sex, date of birth, date of transplant, race, requirement for prospective cross match, occurrence of pre-transplant diagnoses and complications, indication for transplantation, severity and type of heart disease, history of left ventricular assist devices, all known medical diagnoses, blood type, HLA type, viral serologies (including CMV, Hepatitis B and C, HIV and others), serum chemistries, white and red blood cell counts and differentials, CMV infections (clinical manifestations and methods of diagnosis), occurrence of new cancer, hemodynamic parameters measured by catheterization of the right or left heart (measures of graft function), results of echocardiography, results of coronary angiograms, results of intravascular ultrasound studies (diagnosis of transplant vasculopathy), medications, changes in medications, treatments for rejection, and medication levels. Information was also collected regarding the organ donor, including demographics, blood type, HLA type, results of screening cultures, results of viral serologies, primary cause of brain death, the need for inotropic support, and the organ cold ischemia time.

[0542] Of great importance was the collection of the results of endocardial biopsy for each of the patients at each visit. Biopsy results were all interpreted and recorded using the international society for heart and lung transplantation (ISHLT) criteria, described below. Biopsy pathological grades were determined by experienced pathologists at each center. It is desirable to have a single centralized pathologist determine the grades when an analysis is done using samples from multiple medical centers.

ISHLT Criteria

| | | Rejection |
|---|---|---|
| Grade | Finding | Severity |
| 0 | No lymphocytic infiltrates | None |
| 1A | Focal (perivascular or interstitial lymphocytic | Borderline |
| | infiltrates without necrosis) | mild |
| 1B | Diffuse but sparse lymphocytic infiltrates without | Mild |
| | necrosis | |
| 2 | One focus only with aggressive lymphocytic | Mild, |
| | infiltrate and/or myocyte damage | focal |
| | | moderate |
| 3A | Multifocal aggressive lymphocytic infiltrates and/or | Moderate |
| | myocardial damage | |
| 3B | Diffuse inflammatory lymphocytic infiltrates with | Borderline |
| | necrosis | Severe |
| 4 | Diffuse aggressive polymorphous lymphocytic | Severe |
| | infiltrates with edema hemorrhage and vasculitis, | |
| | with necrosis | |

[0543] Clinical data was entered and stored in a database. The database was queried to identify all patients and patient visits that meet desired criteria (for example, patients with >grade II biopsy results, no CMV infection and time since transplant <12 weeks).

[0544] The collected clinical data (disease criteria) is used to define patient or sample groups for correlation of expression data. Patient groups are identified for comparison, for example, a patient group that possesses a useful or interesting clinical distinction, versus a patient group that does not possess the distinction. Examples of useful and interesting patient distinctions that can be made on the basis of collected clinical data are listed here (and further described in Table 2):

[0545] 1. Rejection episode of at least moderate histologic grade, which results in treatment of the patient with additional corticosteroids, anti-T cell antibodies, or total lymphoid irradiation.

[0546] 2. Rejection with histologic grade 2 or higher.

[0547] 3. Rejection with histologic grade <2.

[0548] 4. The absence of histologic rejection and normal or unchanged allograft function (based on hemodynamic measurements from catheterization or on echocardiographic data).

[0549] 5. The presence of severe allograft dysfunction or worsening allograft dysfunction during the study period (based on hemodynamic measurements from catheterization or on echocardiographic data).

[0550] 6. Documented CMV infection by culture, histology, or PCR, and at least one clinical sign or symptom of infection.

[0551] 7. Specific graft biopsy rejection grades

[0552] 8. Rejection of mild to moderate histologic severity prompting augmentation of the patient's chronic immunosuppressive regimen

[0553] 9. Rejection of mild to moderate severity with allograft dysfunction prompting plasmaphoresis or a diagnosis of “humoral” rejection

[0554] 10. Infections other than CMV, esp. Epstein Barr virus (EBV)

[0555] 11. Lymphoproliferative disorder (also called, post-transplant lymphoma)

[0556] 12. Transplant vasculopathy diagnosed by increased intimal thickness on intravascular ultrasound (IVUS), angiography, or acute myocardial infarction.

[0557] 13. Graft Failure or Retransplantation

[0558] All cause mortality

[0559] Expression profiles of subject samples are examined to discover sets of nucleotide sequences with differential expression between patient groups, for example, by methods describes above and below.

[0560] Non-limiting examples of patient leukocyte samples to obtain for discovery of various diagnostic nucleotide sets are as follows:

[0561] a. Leukocyte set to avoid biopsy or select for biopsy:
[0562] Samples: Grade 0 vs. Grades 1-4

[0563] b. Leukocyte set to monitor therapeutic response:
[0564] Examine successful vs. unsuccessful drug treatment.
[0565] Samples:
[0566] Successful: Time 1: rejection, Time 2: drug therapy Time 3: no rejection Unsuccessful: Time 1: rejection, Time 2: drug therapy; Time 3: rejection

[0567] c. Leukocyte set to predict subsequent acute rejection.
[0568] Biopsy may show no rejection, but the patient may develop rejection shortly thereafter. Look at profiles of patients who subsequently do and do not develop rejection.
[0569] Samples:
[0570] Group 1 (Subsequent rejection): Time 1: Grade 0; Time 2: Grade>0
[0571] Group 2 (No subsequent rejection): Time 1: Grade 0; Time 2: Grade 0
[0572] Focal rejection may be missed by biopsy. When this occurs the patient may have a Grade 0, but actually has rejection. These patients may go on to have damage to the graft etc.
[0573] Samples:
[0574] Non-rejectors: no rejection over some period of time
[0575] Rejectors: an episode of rejection over same period

[0576] d. Leukocyte set to diagnose subsequent or current graft failure:
[0577] Samples:
[0578] Echocardiographic or catheterization data to define worsening function over time and correlate to profiles.

[0579] e. Leukocyte set to diagnose impending active CMV:
[0580] Samples:
[0581] Look at patients who are CMV IgG positive. Compare patients with subsequent (to a sample) clinical CMV infection verses no subsequent clinical CMV infection.

[0582] f. Leukocyte set to diagnose current active CMV:
[0583] Samples:
[0584] Analyze patients who are CMV IgG positive. Compare patients with active current clinical CMV infection vs. no active current CMV infection.

[0585] Upon identification of a nucleotide sequence or set of nucleotide sequences that distinguish patient groups with a high degree of accuracy, that nucleotide sequence or set of nucleotide sequences is validated, and implemented as a diagnostic test. The use of the test depends on the patient groups that are used to discover the nucleotide set. For example, if a set of nucleotide sequences is discovered that have collective expression behavior that reliably distinguishes patients with no histological rejection or graft dysfunction from all others, a diagnostic is developed that is used to screen patients for the need for biopsy. Patients identified as having no rejection do not need biopsy, while others are subjected to a biopsy to further define the extent of disease. In another example, a diagnostic nucleotide set that determines continuing graft rejection associated with myocyte necrosis (>grade I) is used to determine that a patient is not receiving adequate treatment under the current treatment regimen. After increased or altered immunosuppressive therapy, diagnostic profiling is conducted to determine whether continuing graft rejection is progressing. In yet another example, a diagnostic nucleotide set(s) that determine a patient's rejection status and diagnose cytomegalovirus infection is used to balance immunosuppressive and anti-viral therapy.

### Example 12

### Identification of Diagnostic Nucleotide Sets for Kidney and Liver Allograft Rejection

[0586] Diagnostic tests for rejection are identified using patient leukocyte expression profiles to identify a molecular signature correlated with rejection of a transplanted kidney or liver. Blood, or other leukocyte source, samples are obtained from patients undergoing kidney or liver biopsy following liver or kidney transplantation, respectively. Such results reveal the histological grade, i.e., the state and severity of allograft rejection. Expression profiles are obtained from the samples as described above, and the expression profile is correlated with biopsy results. In the case of kidney rejection, clinical data is collected corresponding to urine output, level of creatine clearance, and level of serum creatine (and other markers of renal function). Clinical data collected for monitoring liver transplant rejection includes, biochemical characterization of serum markers of liver damage and function such as SGOT, SGPT, Alkaline phosphatase, GGT, Bilirubin, Albumin and Prothrombin time.

[0587] Leukocyte nucleotide sequence expression profiles are collected and correlated with important clinical states and outcomes in renal or hepatic transplantation. Examples of useful clinical correlates are given here:

[0588] 1. Rejection episode of at least moderate histologic grade, which results in treatment of the patient with additional corticosteriods, anti-T cell antibodies, or total lymphoid irradiation.

[0589] 2. The absence of histologic rejection and normal or unchanged allograft function (based on tests of renal or liver function listed above).

[0590] 3. The presence of severe allograft dysfunction or worsening allograft dysfunction during the study period (based on tests of renal and hepatic function listed above).

[0591] 4. Documented CMV infection by culture, histology, or PCR, and at least one clinical sign or symptom of infection.

[0592] 5. Specific graft biopsy rejection grades

[0593] 6. Rejection of mild to moderate histologic severity prompting augmentation of the patient's chronic immunosuppressive regimen

[0594] 7. Infections other than CMV, esp. Epstein Barr virus (EBV)

[0595] 8. Lymphoproliferative disorder (also called, post-transplant lymphoma)

[0596] 9. Graft Failure or Retransplantation

[0597] 10. Need for hemodialysis or other renal replacement therapy for renal transplant patients.

[0598] 11. Hepatic encephalopathy for liver transplant recipients.

[0599] 12. All cause mortality

[0600] Subsets of the candidate library (or of a previously identified diagnostic nucleotide set), are identified, according to the above procedures, that have predictive and/or diagnostic value for kidney or liver allograft rejection.

### Example 13

### Identification of Diagnostic Nucleotide Sequences Sets for Use in the Diagnosis, Prognosis, Risk Stratification, and Treatment of Atherosclerosis, Stable Angina Pectoris, and Acute Coronary Syndrome

[0601] Prediction of Complications of Atherosclerosis: Angina Pectoris.

[0602] Over 50 million in the US have atherosclerotic coronary artery disease (CAD). Almost all adults have some atherosclerosis. The most important question is who will develop complications of atherosclerosis. Patients with angiographically-confirmed atherosclerosis are enrolled in a study, and followed over time. Leukocyte expression profiles are taken at the beginning of the study, and routinely thereafter. Some patients develop angina and others do not. Expression profiles are correlated with development of angina, and subsets of the candidate library (or a previously identified diagnostic nucleotide set) are identified, according to the above procedures, that have predictive and/or diagnostic value for angina pectoris.

[0603] Alternatively, patients are followed by serial angiography. Profiles are collected at the first angiography, and at a repeat angiography at some future time (for example, after 1 year). Expression profiles are correlated with progression of disease, measured, for example, by decrease in vessel lumen diameter. Subsets of the candidate library (or a previously identified diagnostic nucleotide set) are identified, according to the above procedures, that have predictive and/or diagnostic value for progression of atherosclerosis.

[0604] Prediction and/or Diagnosis of Acute Coronary Syndrome

[0605] The main cause of death due to coronary atherosclerosis is the occurrence of acute coronary syndromes: myocardial infarction and unstable angina. Patients with at a very high risk of acute coronary syndrome (e.g., patients with a history of acute coronary syndrome, patients with atherosclerosis, patients with multiple traditional risk factors, clotting disorders or lupus) are enrolled in a prospective study. Leukocyte expression profiles are taken at the beginning of the study period and patients are monitored for the occurrence of unstable angina and/or myocardial infarction. Standard criteria for the occurrence of an event are used (serum enzyme elevation, EKG, nuclear imaging or other), and the occurrence of these events can be collected from the patient, the patient's physician, the medical record or medical database. Expression profiles (taken at the beginning of the study) are correlated with the occurrence of an acute event. Subsets of the candidate library (or a previously identified diagnostic nucleotide set) are identified, according to the above procedures, that have predictive value for occurrence of an acute event.

[0606] In addition, expression profiles (taken at the time that an acute event occurs) are correlated with the occurrence of an acute event. Subsets of the candidate library (or a previously identified diagnostic nucleotide set) are identified, according to the above procedures, that have diagnostic value for occurrence of an acute event.

[0607] Risk Stratification: Occurrence of Coronary Artery Disease

[0608] The established and classic risks for the occurrence of coronary artery disease and complications of that disease are: cigarette smoking, diabetes, hypertension, hyperlipidemia and a family history of early atherosclerosis. Obesity, sedentary lifestyle, syndrome X, cocaine use, chronic hemodialysis and renal disease, radiation exposure, endothelial dysfunction, elevated plasma homocysteine, elevated plasma lipoprotein a, and elevated CRP. Infection with CMV and chlamydia infection are less well established, controversial or putative risk factors for the disease. These risk factors can be assessed or measured in a population.

[0609] Leukocyte expression profiles are measured in a population possessing risk factors for the occurrence of coronary artery disease. Expression profiles are correlated with the presence of one or more risk factors (that may correlate with future development of disease and complications). Subsets of the candidate library (or a previously identified diagnostic nucleotide set) are identified, according to the above procedures, that have predictive value for the development of coronary artery disease.

[0610] Additional examples of useful correlation groups in cardiology include:

[0611] 1. Samples from patients with a high risk factor burden (e.g., smoking, diabetes, high cholesterol, hypertension, family history) versus samples from those same patients at different times with fewer risks, or versus samples from different patients with fewer or different risks.

[0612] 2. Samples from patients during an episode of unstable angina or myocardial infarction versus paired samples from those same patients before the episode or after recovery, or from different patients without these diagnoses.

[0613] 3. Samples from patients (with or without documented atherosclerosis) who subsequently develop clinical manifestations of atherosclerosis such as stable angina, unstable angina, myocardial infarction, or stroke, versus samples from patients (with or without atherosclerosis) who do not develop these manifestations over the same time period.

[0614] 4. Samples from patients who subsequently respond to a given medication or treatment regimen versus samples from those same or different patients who subsequently do not respond to a given medication or treatment regimen.

### Example 14

### Identification of Diagnostic Nucleotide Sets for Use in Diagnosing and Treating Restenosis

[0615] Restenosis is the re-narrowing of a coronary artery after an angioplasty. Patients are identified who are about to, or have recently undergone angioplasty. Leukocyte expression profiles are measured before the angioplasty, and at 1 day and 1-2 weeks after angioplasty or stent placement. Patients have a follow-up angiogram at 3 months and/or are followed for the occurrence of clinical restenosis, e.g., chest pain due to re-narrowing of the artery, that is confirmed by angiography. Expression profiles are compared between patients with and without restenosis, and candidate nucleotide profiles are correlated with the occurrence of restenosis. Subsets of the candidate library (or a previously identified diagnostic nucleotide set) are identified, according to the above procedures, that have predictive value for the development of restenosis.

### Example 15

### Identification of Diagnostic Nucleotide Sets for Use in Monitoring Treatment an and/or Progression of Congestive Heart Failure

[0616] CHF effects greater than 5 million individuals in the US and the prevalence of this disorder is growing as the population ages. The disease is chronic and debilitating. Medical expenditures are huge due to the costs of drug treatments, echocardiograms and other tests, frequent hospitalization and cardiac transplantation. The primary causes of CHF are coronary artery disease, hypertension and idiopathic cardiomyopathy. Congestive heart failure is the number one indication for heart transplantation.

[0617] There is ample recent evidence that congestive heart failure is associated with systemic inflammation. A leukocyte test with the ability to determine the rate of progression and the adequacy of therapy is of great interest. Patients with severe CHF are identified, e.g. in a CHF clinic, an inpatient service, or a CHF study or registry (such as the cardiac transplant waiting list/registry). Expression profiles are taken at the beginning of the study and patients are followed over time, for example, over the course of one year, with serial assessments performed at least every three months. Further profiles are taken at clinically relevant end-points, for example: hospitalization for CHF, death, pulmonary edema, worsening of Ejection Fraction or increased cardiac chamber dimensions determined by echocardiography or another imaging test, and/or exercise testing of hemodynamic measurements. Clinical data is collected from patients if available, including:

[0618] Serial C-Reactive Protein (CRP), other serum markers, echocardiography (e.g., ejection fraction or another echocardiographic measure of cardiac function), nuclear imaging, NYHA functional classes, hospitalizations for CHF, quality of life measures, renal function, transplant listing, pulmonary edema, left ventricular assist device use, medication use and changes.

[0619] Expression profiles correlating with progression of CHF are identified. Expression profiles predicting disease progression, monitoring disease progression and response to treatment, and predicting response to a particular treatment(s) or class of treatment(s) are identified. Subsets of the candidate library (or a previously identified diagnostic nucleotide set) are identified, according to the above procedures, that have predictive value for the progression of CHF. Such diagnostic nucleotide sets are also useful for monitoring response to treatment for CHF.

### Example 16

### Identification of Diagnostic Nucleotide Sets for Use in Monitoring Treatment and/or Progression of Rheumatoid Arthritis

[0620] Rheumatoid arthritis (hereinafter, “RA”) is a chronic and debilitating inflammatory arthritis. The diagnosis of RA is made by clinical criteria and radiographs. A new class of medication, TNF blockers, are effective, but the drugs are expensive, have side effects and not all patients respond to treatment. In addition, relief of disease symptoms does not always correlate with inhibition ofjoint destruction. For these reasons, an alternative mechanism for the titration of therapy is needed.

[0621] An observational study was conducted in which a cohort of patients meeting American College of Rheumatology (hereinafter “ARC”) criteria for the diagnosis of RA was identified. Arnett et al. (1988) Arthritis Rheum 31:315-24. Patients gave informed consent and a peripheral blood mononuclear cell RNA sample was obtained by the methods as described herein. When available, RNA samples were also obtained from surgical specimens of bone or synovium from effected joints, and synovial fluid.

[0622] From each patient, the following clinical information was obtained if available:

[0623] Demographic information; information relating to the ACR criteria for RA; presence or absence of additional diagnoses of inflammatory and non-inflammatory conditions; data from laboratory test, including complete blood counts with differentials, CRP, ESR, ANA, Serum IL6, Soluble CD40 ligand, LDL, HDL, Anti-DNA antibodies, rheumatoid factor, C3, C4, serum creatinine and any medication levels; data from surgical procedures such as gross operative findings and pathological evaluation of resected tissues and biopsies; information on pharmacological therapy and treatment changes; clinical diagnoses of disease “flare”; hospitalizations; quantitative joint exams; results from health assessment questionnaires (HAQs); other clinical measures of patient symptoms and disability; physical examination results and radiographic data assessing joint involvement, synovial thickening, bone loss and erosion and joint space narrowing and deformity.

[0624] From these data, measures of improvement in RA are derived as exemplified by the ACR 20% and 50% response/improvement rates (Felson et al. 1996). Measures of disease activity over some period of time is derived from these data as are measures of disease progression. Serial radiography of effected joints is used for objective determination of progression (e.g., joint space narrowing, peri-articular osteoporosis, synovial thickening). Disease activity is determined from the clinical scores, medical history, physical exam, lab studies, surgical and pathological findings.

[0625] The collected clinical data (disease criteria) is used to define patient or sample groups for correlation of expression data. Patient groups are identified for comparison, for example, a patient group that possesses a useful or interesting clinical distinction, verses a patient group that does not possess the distinction. Examples of useful and interesting patient distinctions that can be made on the basis of collected clinical data are listed here:

[0626] 1. Samples from patients during a clinically diagnosed RA flare versus samples from these same or different patients while they are asymptomatic.

[0627] 2. Samples from patients who subsequently have high measures of disease activity versus samples from those same or different patients who have low subsequent disease activity.

[0628] 3. Samples from patients who subsequently have high measures of disease progression versus samples from those same or different patients who have low subsequent disease progression.

[0629] 4. Samples from patients who subsequently respond to a given medication or treatment regimen versus samples from those same or different patients who subsequently do not respond to a given medication or treatment regimen (for example, TNF pathway blocking medications).

[0630] 5. Samples from patients with a diagnosis of osteoarthritis versus patients with rheumatoid arthritis.

[0631] 6. Samples from patients with tissue biopsy results showing a high degree of inflammation versus samples from patients with lesser degrees of histological evidence of inflammation on biopsy.

[0632] Expression profiles correlating with progression of RA are identified. Subsets of the candidate library (or a previously identified diagnostic nucleotide set) are identified, according to the above procedures, that have predictive value for the progression of RA.

[0633] Diagnostic nucleotide set(s) are identified which predict respond to TNF blockade. Patients are profiled before and during treatment with these medications. Patients are followed for relief of symptoms, side effects and progression of joint destruction, e.g., as measured by hand radiographs. Expression profiles correlating with response to TNF blockade are identified. Subsets of the candidate library (or a previously identified diagnostic nucleotide set) are identified, according to the above procedures that have predictive value for response to TNF blockade.

### Example 17

### Identification of Diagnostic Nucleotide Sets for Diagnosis of Systemic Lupus Erythematosis

[0634] SLE is a chronic, systemic inflammatory disease characterized by dysregulation of the immune system. Clinical manifestations affect every organ system and include skin rash, renal dysfunction, CNS disorders, arthralgias and hematologic abnormalities. SLE clinical manifestations tend to both recur intermittently (or “flare”) and progress over time, leading to permanent end-organ damage.

[0635] An observational study was conducted in which a cohort of patients meeting American College of Rheumatology (hereinafter “ACR”) criteria for the diagnosis of SLE were identified. See Tan et al. (1982) Arthritis Rheum 25:1271-7. Patients gave informed consent and a peripheral blood mononuclear cell RNA sample was obtained by the methods as described herein.

[0636] From each patient, the following clinical information was obtained if available:

[0637] Demographic information, ACR criteria for SLE, additional diagnoses of inflammatory and non-inflammatory conditions, data from laboratory testing including complete blood counts with differentials, CRP, ESR, ANA, Serum IL6, Soluble CD40 ligand, LDL, HDL, Anti-DNA antibodies, rheumatoid factor, C3, C4, serum creatinine (and other measures of renal dysfunction) and any medication levels, data from surgical procedures such as gross operative findings and pathological evaluation of resected tissues and biopsies (e.g., renal, CNS), information on pharmacological therapy and treatment changes, clinical diagnoses of disease “flare”, hospitalizations, quantitative joint exams, results from health assessment questionnaires (HAQs), SLEDAIs (a clinical score for SLE activity that assess many clinical variables), other clinical measures of patient symptoms and disability, physical examination results and carotid ultrasonography.

[0638] The collected clinical data (disease criteria) is used to define patient or sample groups for correlation of expression data. Patient groups are identified for comparison, for example, a patient group that possesses a useful or interesting clinical distinction, verses a patient group that does not possess the distinction. Measures of disease activity in SLE are derived from the clinical data described above to divide patients (and patient samples) into groups with higher and lower disease activity over some period of time or at any one point in time. Such data are SLEDAI scores and other clinical scores, levels of inflammatory markers or complement, number of hospitalizations, medication use and changes, biopsy results and data measuring progression of end-organ damage or end-organ damage, including progressive renal failure, carotid atherosclerosis, and CNS dysfunction. Further examples of useful and interesting patient distinctions that can be made on the basis of collected clinical data are listed here:

[0639] Samples from patients during a clinically diagnosed SLE flare versus samples from these same or different patients while they are asymptomatic or while they have a documented infection.

[0640] 1. Samples from patients who subsequently have high measures of disease activity versus samples from those same or different patients who have low subsequent disease activity.

[0641] 2. Samples from patients who subsequently have high measures of disease progression versus samples from those same or different patients who have low subsequent disease progression.

[0642] 3. Samples from patients who subsequently respond to a given medication or treatment regimen versus samples from those same or different patients who subsequently do not respond to a given medication or treatment regimen.

[0643] 4. Samples from patients with premature carotid atherosclerosis on ultrasonography versus patients with SLE without premature atherosclerosis.

[0644] Expression profiles correlating with progression of SLE are identified, including expression profiles corresponding to end-organ damage and progression of end-organ damage. Expression profiles are identified predicting disease progression or disease “flare”, response to treatment or likelihood of response to treatment, predict likelihood of “low” or “high” disease measures (optionally described using the SLEDAI score), and presence or likelihood of developing premature carotid atherosclerosis. Subsets of the candidate library (or a previously identified diagnostic nucleotide set) are identified, according to the above procedures, that have predictive value for the progression of SLE.

### Example 18

### Identification of a Diagnostic Nucleotide Set for Diagnosis of Cytomegalovirus

[0645] Cytomegalovirus is a very important cause of disease in immunosupressed patients, for example, transplant patients, cancer patients, and AIDS patients. The virus can cause inflammation and disease in almost any tissue (particularly the colon, lung, bone marrow and retina). It is increasingly important to identify patients with current or impending clinical CMV disease, particularly when immunosuppressive drugs are to be used in a patient, e.g. for preventing transplant rejection.

[0646] Leukocytes are profiled in patients with active CMV, impending CMV, or no CMV. Expression profiles correlating with diagnosis of active or impending CMV are identified. Subsets of the candidate library (or a previously identified diagnostic nucleotide set) are identified, according to the above procedures, that have predictive value for the diagnosis of active or impending CMV. Diagnostic nucleotide set(s) identified with predictive value for the diagnosis of active or impending CMV may be combined, or used in conjunction with, cardiac, liver and/or kidney allograft-related diagnostic gene set(s) (described in Examples 11 and 12).

[0647] In addition, or alternatively, CMV nucleotide sequences are obtained, and a diagnostic nucleotide set is designed using CMV nucleotide sequence. The entire sequence of the organism is known and all CMV nucleotide sequences can be isolated and added to the library using the sequence information and the approach described below. Known expressed genes are preferred. Alternatively, nucleotide sequences are selected to represent groups of CMV genes that are coordinately expressed (immediate early genes, early genes, and late genes) (Spector et al. 1990, Stamminger et al. 1990).

[0648] CMV nucleotide sequences were isolated as follows: Primers were designed to amplify known expressed CMV genes, based on the publically available sequence of CMV strain AD 169 (Genbank LOCUS: HEHCMVCG 229354 bp; DEFINITION Human cytomegalovirus strain AD169 complete genome; ACCESSION X17403; VERSION X17403.1 GI:59591). The following primer were used to PCR amplify nucleotide sequences from 175 ng of AD 169 viral genomic DNA (Advance Biotechnologies Incorporated) as a template:

| | | |
|---|---|---|
| CMV GENE | PRIMER SEQUENCES | SEQ. ID. NO: |

| | | |
|---|---|---|
| UL21 5′ | atgtggccgcttctgaaaaac | 8771 |
| UL21 3′ | tcatggggtggggacgggg | 8772 |
| UL33 5′ | gtacgcgctgctgggtcatg | 8773 |
| UL33 3′ | tcataccccgctgaggttatg | 8774 |
| UL54 5′ | cacggacgacgacgctgacg | 8775 |
| UL54 3′ | gtacggcagaaaagccggctc | 8776 |
| UL55 5′ | caccaaagacacgtcgttacag | 8777 |
| UL55 3′ | tcagacgttctcttcttcgtcg | 8778 |
| UL75 5′ | cagcggcgctcaacatttcac | 8779 |
| UL75 3′ | tcagcatgtcttgagcatgcgg | 8780 |
| UL80 5′ | cctccccaactactactaccg | 8781 |
| UL80 3′ | ttactcgagcttattgagcgcag | 8782 |
| UL83 5′ | cacgtcgggcgttatgacac | 8783 |
| UL83 3′ | tcaacctcggtgctttttggg | 8784 |
| UL97 5′ | ctgtctgctcattctggcgg | 8785 |
| UL97 3′ | ttactcggggaacagttggcg | 8786 |
| UL106 5′ | atgatgaccgaccgcacgga | 8787 |
| UL106 3′ | tcacggtggctcgatacactg | 8788 |
| UL107 5′ | aagcttccttacagcataactgt | 8789 |
| UL107 3′ | ccttataacatgtattttgaaaaattg | 8790 |
| UL109 5′ | atgatacacgactaccactgg | 8791 |
| UL109 3′ | ttacgagcaagagttcatcacg | 8792 |
| UL112 5′ | ctgcgtgtcctcgctgggt | 8793 |
| UL112 3′ | tcacgagtccactcggaaagc | 8794 |
| UL113 5′ | ctcgtcttcttcggctccac | 8795 |
| UL113 3′ | ttaatcgtcgaaaaacgccgcg | 8796 |
| UL122 5′ | gatgcttgtaacgaaggcgtc | 8797 |
| UL122 3′ | ttactgagacttgttcctcagg | 8798 |
| UL123 5′ | gtagcctacactttggccacc | 8799 |
| UL123 3′ | ttactggtcagccttgcttcta | 8800 |
| IRL2 5′ | acgtccctggtagacggg | 8801 |
| IRL2 3′ | ttataagaaaagaagcacaagctc | 8802 |
| IRL3 5′ | atgtattgttttctttttttacagaaag | 8803 |
| IRL3 3′ | ttatattattatcaaaacgaaaaacag | 8804 |
| IRL4 5′ | cttctcctttccttaatctcgg | 8805 |
| IRL4 3′ | ctatacggagatcgcggtcc | 8806 |
| IRL5 5′ | atgcatacatacacgcgtgcat | 8807 |
| IRL5 3′ | ctaccatataaaaacgcagggg | 8808 |
| IRL7 5′ | atgaaagcaagaggcagccg | 8809 |
| IRL7 3′ | tcataaggtaacgatgctacttt | 8810 |
| IRL13 5′ | atggactggcgatttacggtt | 8811 |
| IRL13 3′ | ctacattgtgccatttctcagt | 8812 |
| US2 5′ | atgaacaatctctggaaagcctg | 8813 |
| US2 3′ | tcagcacacgaaaaaccgcatc | 8814 |
| US3 5′ | atgaagccggtgttggtgctc | 8815 |
| US3 3′ | ttaaataaatcgcagacgggcg | 8816 |
| US6 5′ | atggatctcttgattcgtctcg | 8817 |
| US6 3′ | tcaggagccacaacgtcgaatc | 8818 |
| US11 5′ | cgcaaaacgctactggctcc | 8819 |
| US11 3′ | tcaccactggtccgaaaacatc | 8820 |
| US18 5′ | tacggctggtccgtcatcgt | 8821 |
| US18 3′ | ttacaacaagctgaggagactc | 8822 |
| US27 5′ | atgaccacctctacaaataatcaaac | 8823 |
| US27 3′ | gtagaaacaagcgttgagtccc | 8824 |
| US28 5′ | cgttgcggtgtctcagtcg | 8825 |
| US28 3′ | tcatgctgtggtaccaggata | 8826 |

[0649] The PCR reaction conditions were 10 mM Tris pH 8.3, 3.5 mM MgCl2, 25 mM KCl, 200 uM dNTP's, 0.2 uM primers, and 5 Units of Taq Gold. The cycle parameters were as follows:

[0650] 1. 95° C. for 30 sec

[0651] 2. 95° C. for 15 sec

[0652] 3. 56° C. for 30 sec

[0653] 4. 72° C. for 2 min

[0654] 5. go to step 2, 29 times

[0655] 6. 72° C. for 2 min

[0656] 7. 4° C. forever

[0657] PCR products were gel purified, and DNA was extracted from the agarose using the QiaexII gel purification kit (Qiagen). PCR product was ligated into the T/A cloning vector p-GEM-T-Easy (Promega) using 3 ul of gel purified PCR product and following the Promega protocol. The products of the ligation reaction were transformed and plated as described in the p-GEM protocol. White colonies were picked and grow culture in LB-AMP medium. Plasmid was prepared from these cultures using Qiagen Miniprep kit (Qiagen). Restriction enzyme digested plasmid (Not I and EcoRI) was examined after agarose gel electrophoresis to assess insert size. When the insert was the predicted size, the plasmid was sequenced by well-known techniques to confirm the identity of the CMV gene. Using forward and reverse primers that are complimentary to sequences flanking the insert cloning site (M13F and M13R), the isolated CMV gene was amplified and purified as described above. Amplified cDNAs were used to create a microarray as described above. In addition, 50mer oligonucleotides corresponding the CMV genes listed above were designed, synthesized and placed on a microarray using methods described elsewhere in the specification.

[0658] Alternatively, oligonucleotide sequences aredesigned and synthesized for oligonucleotide array expression analysis from CMV genes as described in examples 20-22.

[0659] Diagnostic nucleotide set(s) for expression of CMV genes is used in combination with diagnostic leukocyte nucleotide sets for diagnosis of other conditions, e.g. organ allograft rejection.

### Example 19

### Identification of Diagnostic Nucleotide Sets for Monitoring Response to Statins

[0660] HMG-CoA reductase inhibitors, called “Statins,” are very effective in preventing complications of coronary artery disease in either patients with coronary disease and high cholesterol (secondary prevention) or patients without known coronary disease and with high cholesterol (primary prevention). Examples of Statins are (generic names given) pravistatin, atorvastatin, and simvastain. Monitoring response to Statin therapy is of interest. Patients are identified who are on or are about to start Statin therapy. Leukocytes are profiled in patients before and after initiation of therapy, or in patients already being treated with Statins. Data is collected corresponding to cholesterol level, markers of inflammation (e.g., C-Reactive Protein and the Erythrocyte Sedimentation Rate), measures of endothelial function (e.g., improved forearm resistance or coronary flow reserve) and clinical endpoints (new stable angina, unstable angina, myocardial infarction, ventricular arrhythmia, claudication). Patient groups can be defined based on their response to Statin therapy (cholesterol, clinical endpoints, endothelial function). Expression profiles correlating with response to Statin treatment are identified. Subsets of the candidate library (or a previously identified diagnostic nucleotide set) are identified, according to the above procedures, that have predictive value for the response to Statins. Members of candidate nucleotide sets with expression that is altered by Statins are disease target nucleotides sequences.

### Example 20

### Probe Selection for a 24,000 Feature Array

[0661] This Example describes the compilation of almost 8,000 unique genes and ESTs using sequences identified from the sources described below. The sequences of these genes and ESTs were used to design probes, as described in the following Example.

[0662] Tables 3A, 3B and 3C list the sequences identified in the subtracted leukocyte expression libraries. All sequences that were identified as corresponding to a known RNA transcript were represented at least once, and all unidentified sequences were represented twice—once by the sequence on file and again by the complementary sequence—to ensure that the sense (or coding) strand of the gene sequence was included.

[0663] Table 3A. Table 3A contained all those sequences in BioCardia's subtracted libraries that matched sequences in GenBank's nr, EST_Human, and UniGene databases with an acceptable level of confidence. All the entries in the table representing the sense strand of their genes were grouped together and all those representing the antisense strand were grouped. A third group contained those entries whose strand could not be determined. Two complementary probes were designed for each member of this third group.

[0664] Table 3B and 3C. Table 3B and 3C contained all those sequences in the leukocyte expression subtracted library that did not match sequences in GenBank's nr, EST_Human, and UniGene databases with an acceptable level of confidence, but which had a high probability of representing real mRNA sequences. Sequences in Table 3B did not match anything in the databases above but matched regions of the human genome draft and were spatially clustered along it, suggesting that they were exons, rather than genomic DNA included in the library by chance. Sequences in Table 3C also aligned well to regions of the human genome draft, but the aligned regions were interrupted by genomic DNA, meaning they were likely to be spliced transcripts of multiple exon genes.

[0665] Table 3B lists 510 clones and Table 3C lists 48 clones that originally had no similarity with any sequence in the public databases. Blastn searches conducted after the initial filing have identified sequences in the public database with high similarity (E values less than 1 e-40) to the sequences determined for these clones. Table 3B contained 272 clones and Table 3C contained 25 clones that were found to have high similarity to sequences in dbEST. The sequences of the similar dbEST clones were used to design probes. Sequences from clones that contained no similar regions to any sequence in the database were used to design a pair of complementary probes.

[0666] Probes were designed from database sequences that had the highest similarity to each of the sequenced clones in Tables 3A, 3B, and 3C. Based on BLASTn searches the most similar database sequence was identified by locus number and the locus number was submitted to GenBank using batch Entrez (http://www.ncbi.nlm.nih.gov/entrez/batchentrez.cgi?db=Nucleotide) to obtain the sequence for that locus. The GenBank entry sequence was used because in most cases it was more complete or was derived from multi-pass sequencing and thus would likely have fewer errors than the single pass cDNA library sequences. When only UniGene cluster IDs were available for genes of interest, the respective sequences were extracted from the UniGene_unique database, build 137, downloaded from NCBI (ftp://ncbi.nlm.nih.gov/repository/UniGene/). This database contains one representative sequence for each cluster in UniGene.

Summary of BioCardia library clones used in probe design

| | Sense | Antisense | Strand |
|---|---|---|---|
| Table | Strand | Strand | Undetermined |
| Table 3A | 3621 | 763 | 124 |
| Table 3B | 142 | 130 | 238 |
| Table 3C | 19 | 6 | 23 |
| Totals | 3782 | 899 | 385 |

[0667] Literature Searches

[0668] Example 2 describes searches of literature databases. We also searched for research articles discussing genes expressed only in leukocytes or involved in inflammation and particular disease conditions, including genes that were specifically expressed or down-regulated in a disease state. Searches included, but were not limited to, the following terms and various combinations of theses terms: inflammation, atherosclerosis, rheumatoid arthritis, osteoarthritis, lupus, SLE, allograft, transplant, rejection, leukocyte, monocyte, lymphocyte, mononuclear, macrophage, neutrophil, eosinophil, basophil, platelet, congestive heart failure, expression, profiling, microarray, inflammatory bowel disease, asthma, RNA expression, gene expression, granulocyte.

[0669] A UniGene cluster ID or GenBank accession number was found for each gene in the list. The strand of the corresponding sequence was determined, if possible, and the genes were divided into the three groups: sense (coding) strand, anti-sense strand, or strand unknown. The rest of the probe design process was carried out as described above for the sequences from the leukocyte subtracted expression library.

Database Mining

[0670] Database mining was performed as described in Example 2. In addition, the Library Browser at the NCBI UniGene web site (http://www.ncbi.nlm.nih.gov/UniGene/lbrowse.cgi?ORG=Hs&DISPLAY=ALL) was used to identify genes that are specifically expressed in leukocyte cell populations. All expression libraries available at the time were examined and those derived from leukocytes were viewed individually. Each library viewed through the Library Browser at the UniGene web site contains a section titled “Shown below are UniGene clusters of special interest only” that lists genes that are either highly represented or found only in that library. Only the genes in this section were downloaded from each library. Alternatively, every sequence in each library is downloaded and then redundancy between libraries is reduced by discarding all UniGene cluster IDs that are represented more than once. A total of 439 libraries were downloaded, containing 35,819 genes, although many were found in more than one library. The most important libraries from the remaining set were separated and 3,914 genes remained. After eliminating all redundancy between these libraries and comparing the remaining genes to those listed in Tables 3A, 3B and 3C, the set was reduced to 2,573 genes in 35 libraries (listed below). From these, all genes in first 30 libraries were used to design probes. A random subset of genes was used from Library Lib.376, “Activated_T-cells_XX”. From the last four libraries, a random subset of sequences listed as “ESTs, found only in this library” was used.

| | | | No. of | No. of |
|---|---|---|---|---|
| | | | sequences | sequences |
| Library | | | before | used on |
| ID | Library Name | Category | reduction | array* |
| Lib.2228 | Human_leukocyte_MATCHMAKER_cDNA_Library | other/unclassified | 4 | 3 |
| Lib.238 | RA-MO-III (activated monocytes from RA patient) | Blood | 2 | 1 |
| Lib.242 | Human_peripheral_blood_(Whole)_(Steve_Elledge) | Blood | 4 | 2 |
| Lib.2439 | Subtracted_cDNA_libraries_from_human_Jurkat_cells | other/unclassified | 4 | 1 |
| Lib.323 | Activated_T-cells_I | other/unclassified | 19 | 3 |
| Lib.327 | Monocytes,_stimulated_II | Blood | 92 | 35 |
| Lib.387 | Macrophage_I | other/unclassified | 84 | 24 |
| Lib.409 | Activated_T-cells_IV | other/unclassified | 37 | 10 |
| Lib.410 | Activated_T-cells_VIII | other/unclassified | 27 | 10 |
| Lib.411 | Activated_T-cells_V | other/unclassified | 41 | 9 |
| Lib.412 | Activated_T-cells_XII | other/unclassified | 29 | 12 |
| Lib.413 | Activated_T-cells_XI | other/unclassified | 13 | 6 |
| Lib.414 | Activated_T-cells_II | other/unclassified | 69 | 30 |
| Lib.429 | Macrophage_II | other/unclassified | 56 | 24 |
| Lib.4480 | Homo_sapiens_rheumatoid_arthritis_fibroblast-like_synovial | other/unclassified | 7 | 6 |
| Lib.476 | Macrophage,_subtracted_(total_cDNA) | other/unclassified | 11 | 1 |
| Lib.490 | Activated_T-cells_III | other/unclassified | 9 | 5 |
| Lib.491 | Activated_T-cells_VII | other/unclassified | 27 | 8 |
| Lib.492 | Activated_T-cells_IX | other/unclassified | 16 | 5 |
| Lib.493 | Activated_T-cells_VI | other/unclassified | 31 | 15 |
| Lib.494 | Activated_T-cells_X | other/unclassified | 18 | 5 |
| Lib.498 | RA-MO-I (activated peripheral blood monocytes from RA patient) | Blood | 2 | 1 |
| Lib.5009 | Homo_Sapiens_cDNA_Library_from_Peripheral_White_Blood_Cell | other/unclassified | 3 | 3 |
| Lib.6338 | human_activated_B_lymphocyte | Tonsils | 9 | 8 |
| Lib.6342 | Human_lymphocytes | other/unclassified | 2 | 2 |
| Lib.646 | Human_leukocyte_(M.L. Markelov) | other/unclassified | 1 | 1 |
| Lib.689 | Subtracted_cDNA_library_of_activated_B_lymphocyte | Tonsil | 1 | 1 |
| Lib.773 | PMA-induced_HL60_cell_subtraction_library (leukemia) | other/unclassified | 6 | 3 |
| Lib.1367 | cDNA_Library_from_rIL-2_activated_lymphocytes | other/unclassified | 3 | 2 |
| Lib.5018 | Homo_sapiens_CD4+_T-cell_clone_HAI.7 | other/unclassified | 6 | 3 |
| Lib.376 | Activated_T-cells_XX | other/unclassified | 999 | 119 |
| Lib.669 | NCI_CGAP_CLL1 (Lymphocyte) | Blood | 353 | 81† |
| Lib.1395 | NCI_CGAP_Sub6 (germinal center b-cells) | B cells germinal | 389 | 100† |
| Lib.2217 | NCI_CGAP_Sub7 (germinal center b-cells) | B cells germinal | 605 | 200† |
| Lib.289 | NCI_CGAP_GCB1 (germinal center b-cells) | Tonsil | 935 | 200† |
| Total | | | 3,914 | 939 |

*Redundancy of UniGene numbers between the libraries was eliminated.
†A subset of genes flagged as “Found only in this library” were taken.

Angiogenesis Markers

[0671] sequences derived from an angiogenic endothelial cell subtracted cDNA library obtained from Stanford University were used for probe design. Briefly, using well known subtractive hybridization procedures, (as described in, e.g., U.S. Pat. Nos. 5,958,738; 5,589,339; 5,827,658; 5,712,127; 5,643,761; 5,565,340) modified to normalize expression by suppressing over-representation of abundant RNA species while increasing representation of rare RNA species, a library was produced that is enriched for RNA species (messages) that are differentially expressed between test (stimulated) and control (resting) HUVEC populations. The subtraction/suppression protocol was performed as described by the kit manufacturer (Clontech, PCR-select cDNA Subtraction Kit).

[0672] Pooled primary HUVECs (Clonetics) were cultured in 15% FCS, M199 (GibcoBRL) with standard concentrations of Heparin, Penicillin, Streptomycin, Glutamine and Endothelial Cell Growth Supplement. The cells were cultured on 1% gelatin coated 10 cm dishes. Confluent HUVECs were photographed under phase contrast microscopy. The cells formed a monolayer of flat cells without gaps. Passage 2-5 cells were used for all experiments. Confluent HUVECs were treated with trypsin/EDTA and seeded onto collagen gels. Collagen gels were made according to the protocol of the Collagen manufacturer (Becton Dickinson Labware). Collagen gels were prepared with the following ingredients: Rat tail collagen type I (Collaborative Biomedical) 1.5 mg/mL, mouse laminin (Collaborative Biomedical) 0.5 mg/mL, 10% 10× media 199 (Gibco BRL). 1N NaOH, 10×PBS and sterile water were added in amounts recommended in the protocol. Cell density was measured by microscopy. 1.2×10⁶ cells were seeded onto gels in 6-well, 35 mm dishes, in 5% FCS M199 media. The cells were incubated for 2 hrs at 37 C with 5% CO2. The media was then changed to the same media with the addition of VEGF (Sigma) at 30 ng/mL media. Cells were cultured for 36 hrs. At 12, 24 and 36 hrs, the cells were observed with phase contrast microscopy. At 36 hours, the cells were observed elongating, adhering to each other and forming lumen structures. At 12 and 24 hrs media was aspirated and refreshed. At 36 hrs, the media was aspirated, the cells were rinsed with PBS and then treated with Collagenase (Sigma) 2.5 mg/mL PBS for 5 min with active agitation until the collagen gels were liquefied. The cells were then centrifuged at 4 C, 2000 g for 10 min. The supernatant was removed and the cells were lysed with 1 mL Trizol Reagent (Gibco) per 5×10⁶ cells. Total RNA was prepared as specified in the Trizol instructions for use. mRNA was then isolated as described in the micro-fast track mRNA isolation protocol from Invitrogen. This RNA was used as the tester RNA for the subtraction procedure.

[0673] Ten plates of resting, confluent, p4 HUVECs, were cultured with 15% FCS in the M199 media described above. The media was aspirated and the cells were lysed with 1 mL Trizol and total RNA was prepared according to the Trizol protocol. mRNA was then isolated according to the micro-fast track mRNA isolation protocol from Invitrogen. This RNA served as the control RNA for the subtraction procedure.

[0674] The entire subtraction cloning procedure was carried out as per the user manual for the Clontech PCR Select Subtraction Kit. The cDNAs prepared from the test population of HUVECs were divided into “tester” pools, while cDNAs prepared from the control population of HUVECs were designated the “driver” pool. cDNA was synthesized from the tester and control RNA samples described above. Resulting cDNAs were digested with the restriction enzyme RsaI. Unique double-stranded adapters were ligated to the tester cDNA. An initial hybridization was performed consisting of the tester pools of cDNA (with its corresponding adapter) and an excess of the driver cDNA. The initial hybridization results in a partial normalization of the cDNAs such that high and low abundance messages become more equally represented following hybridization due to a failure of driver/tester hybrids to amplify.

[0675] A second hybridization involved pooling unhybridized sequences from the first hybridization together with the addition of supplemental driver cDNA. In this step, the expressed sequences enriched in the two tester pools following the initial hybridization can hybridize. Hybrids resulting from the hybridization between members of each of the two tester pools are then recovered by amplification in a polymerase chain reaction (PCR) using primers specific for the unique adapters. Again, sequences originating in a tester pool that form hybrids with components of the driver pool are not amplified. Hybrids resulting between members of the same tester pool are eliminated by the formation of “panhandles” between their common 5′ and 3′ ends. This process is illustrated schematically in FIG. 3. The subtraction was done in both directions, producing two libraries, one with clones that are upregulated in tube-formation and one with clones that are down-regulated in the process.

[0676] The resulting PCR products representing partial cDNAs of differentially expressed genes were then cloned (i.e., ligated) into an appropriate vector according to the manufacturer's protocol (pGEM-Teasy from Promega) and transformed into competent bacteria for selection and screening. Colonies (2180) were picked and cultured in LB broth with 50 ug/mL ampicillin at 37 C overnight. Stocks of saturated LB+50 ug/mL ampicillin and 15% glycerol in 96-well plates were stored at −80 C. Plasmid was prepared from 1.4 mL saturated LB broth containing 50 ug/mL ampicillin. This was done in a 96 well format using commercially available kits according to the manufacturer's recommendations (Qiagen 96-turbo prep).

[0677] 2 probes to represent 22 of these sequences required, therefore, a total of 237 probes were derived from this library.

Viral Genes

[0678] Several viruses may play a role in a host of disease including inflammatory disorders, atherosclerosis, and transplant rejection. The table below lists the viral genes represented by oligonucleotide probes on the microarray. Low-complexity regions in the sequences were masked using RepeatMasker before using them to design probes.

| Virus | Gene Name | Genome Location |
|---|---|---|
| Adenovirus, type 2 | E1a | 1226 . . . 1542 |
| Accession #J01917 | E1b_1 | 3270 . . . 3503 |
| | E2a_2 | complement(24089 . . . 25885) |
| | E3-1 | 27609 . . . 29792 |
| | E4 (last exon at 3′-end) | complement(33193 . . . 32802) |
| | IX | 3576 . . . 4034 |
| | Iva2 | complement(4081 . . . 5417) |
| | DNA Polymerase | complement(5187 . . . 5418) |
| Cytomegalovirus | HCMVTRI2 (IRL2) | 1893 . . . 2240 |
| (CMV) | HCMVTRI7 (IRL7) | complement(6595 . . . 6843) |
| Accession #X17403 | HCMVUL21 | complement(26497 . . . 27024) |
| | HCMVUL27 | complement(32831 . . . 34657) |
| | HCMVUL33 | 43251 . . . 44423 |
| | HCMVUL54 | complement(76903 . . . 80631) |
| | HCMVUL75 | complement(107901 . . . 110132) |
| | HCMVUL83 | complement(119352 . . . 121037) |
| | HCMVUL106 | complement(154947 . . . 155324) |
| | HCMVUL109 | complement(157514 . . . 157810) |
| | HCMVUL113 | 161503 . . . 162800 |
| | HCMVUL122 | complement(169364 . . . 170599) |
| | HCMVUL123 (last exon at 3′-end) | complement(171006 . . . 172225) |
| | HCMVUS28 | 219200 . . . 220171 |
| Epstein-Barr virus | Exon in EBNA-1 RNA | 67477 . . . 67649 |
| (EBV) | Exon in EBNA-1 RNA | 98364 . . . 98730 |
| Accession # NC_001345 | BRLF1 | complement(103366 . . . 105183) |
| | BZLF1 (first of 3 exons) | complement(102655 . . . 103155) |
| | BMLF1 | complement(82743 . . . 84059) |
| | BALF2 | complement(161384 . . . 164770) |
| Human Herpesvirus 6 | U16/U17 | complement(26259 . . . 27349) |
| (HHV6) | U89 | complement(133091 . . . 135610) |
| Accession #NC_001664 | U90 | complement(135664 . . . 135948) |
| | U86 | complement(125989 . . . 128136) |
| | U83 | 123528 . . . 123821 |
| | U22 | complement(33739 . . . 34347) |
| | DR2 (DR2L) | 791 . . . 2653 |
| | DR7 (DR7L) | 5629 . . . 6720 |
| | U95 | 142941 . . . 146306 |
| | U94 | complement(141394 . . . 142866) |
| | U39 | complement(59588 . . . 62080) |
| | U42 | complement(69054 . . . 70598) |
| | U81 | complement(121810 . . . 122577) |
| | U91 | 136485 . . . 136829 |

Strand Selection

[0679] It was necessary to design sense oligonucleotide probes because the labeling and hybridization protocol to be used with the microarray results in fluorescently-labeled antisense cRNA. All of the sequences we selected to design probes could be divided into three categories:

[0680] (1) Sequences known to represent the sense strand

[0681] (2) Sequences known to represent the antisense strand

[0682] (3) Sequences whose strand could not be easily determined from their descriptions

[0683] It was not known whether the sequences from the leukocyte subtracted expression library were from the sense or antisense strand. GenBank sequences are reported with sequence given 5′ to 3′, and the majority of the sequences we used to design probes came from accession numbers with descriptions that made it clear whether they represented sense or antisense sequence. For example, all sequences containing “mRNA” in their descriptions were understood to be the sequences of the sense mRNA, unless otherwise noted in the description, and all IMAGE Consortium clones are directionally cloned and so the direction (or sense) of the reported sequence can be determined from the annotation in the GenBank record.

[0684] For accession numbers representing the sense strand, the sequence was downloaded and masked and a probe was designed directly from the sequence. These probes were selected as close to the 3′ end as possible. For accession numbers representing the antisense strand, the sequence was downloaded and masked, and a probe was designed complementary to this sequence. These probes were designed as close to the 5′ end as possible (i.e., complementary to the 3′ end of the sense strand).

[0685] Minimizing Probe Redundancy.

[0686] Multiple copies of certain genes or segments of genes were included in the sequences from each category described above, either by accident or by design. Reducing redundancy within each of the gene sets was necessary to maximize the number of unique genes and ESTs that could be represented on the microarray.

[0687] Three methods were used to reduce redundancy of genes, depending on what information was available. First, in gene sets with multiple occurrences of one or more UniGene numbers, only one occurrence of each UniGene number was kept. Next, each gene set was searched by GenBank accession numbers and only one occurrence of each accession number was conserved. Finally, the gene name, description, or gene symbol were searched for redundant genes with no UniGene number or different accession numbers. In reducing the redundancy of the gene sets, every effort was made to conserve the most information about each gene.

[0688] We note, however, that the UniGene system for clustering submissions to GenBank is frequently updated and UniGene cluster IDs can change. Two or more clusters may be combined under a new cluster ID or a cluster may be split into several new clusters and the original cluster ID retired. Since the lists of genes in each of the gene sets discussed were assembled at different times, the same sequence may appear in several different sets with a different UniGene ID in each.

[0689] Sequences from Table 3A were treated differently. In some cases, two or more of the leukocyte subtracted expression library sequences aligned to different regions of the same GenBank entry, indicating that these sequences were likely to be from different exons in the same gene transcript. In these cases, one representative library sequence corresponding to each presumptive exon was individually listed in Table 3A.

Compilation.

[0690] After redundancy within a gene set was sufficiently reduced, a table of approximately 8,000 unique genes and ESTs was compiled in the following manner. All of the entries in Table 3A were transferred to the new table. The list of genes produced by literature and database searches was added, eliminating any genes already contained in Table 3A. Next, each of the remaining sets of genes was compared to the table and any genes already contained in the table were deleted from the gene sets before appending them to the table.

| | Probes |
|---|---|
| BioCardia Subtracted Leukocyte Expression Library | |
| Table 3A | 4,872 |
| Table 3B | 796 |
| Table 3C | 85 |
| Literature Search Results | 494 |
| Database Mining | 1,607 |
| Viral genes | |
| a. CMV | 14 |
| b. EBV | 6 |
| c. HHV6 | 14 |
| d. Adenovirus | 8 |
| Angiogenesis markers: 215, 22 of which needed two probes | 237 |
| Arabidopsis thaliana genes | 10 |
| Total sequences used to design probes | 8,143 |

### Example 21

### Design of Oligonucleotide Probes

[0691] This section describes the design of four oligonucleotide probes using Array Designer Ver 1.1 (Premier Biosoft International, Palo Alto, Calif.).

Clone 40H12

[0692] Clone 40H12 was sequenced and compared to the nr, dbEST, and UniGene databases at NCBI using the BLAST search tool. The sequence matched accession number NM_{—}002310, a ‘curated RefSeq project’ sequence, see Pruitt et al. (2000) Trends Genet. 16:44-47, encoding leukemia inhibitory factor receptor (LIFR) mRNA with a reported E value of zero. An E value of zero indicates there is, for all practical purposes, no chance that the similarity was random based on the length of the sequence and the composition and size of the database. This sequence, cataloged by accession number NM_{—}002310, is much longer than the sequence of clone 40H12 and has a poly-A tail. This indicated that the sequence cataloged by accession number NM_{—}002310 is the sense strand and a more complete representation of the mRNA than the sequence of clone 40H12, especially at the 3′ end. Accession number “NM_{—}002310” was included in a text file of accession numbers representing sense strand mRNAs, and sequences for the sense strand mRNAs were obtained by uploading a text file containing desired accession numbers as an Entrez search query using the Batch Entrez web interface and saving the results locally as a FASTA file. The following sequence was obtained, and the region of alignment of clone 40H12 is outlined:

| | |
|---|---|
| [chemical structure] | (SEQ ID NO: 8827) |
| [chemical structure] | |
| [chemical structure] | |
| [chemical structure] | |
| [chemical structure] | |
| [chemical structure] | |
| [chemical structure] | |
| [chemical structure] | |
| [chemical structure] | |

[0693] The FASTA file, including the sequence of NM_{—}002310, was masked using the RepeatMasker web interface (Smit, AFA & Green, P RepeatMasker at http://ftp.genome.washington.edu/RM/RepeatMasker.html, Smit and Green). Specifically, during masking, the following types of sequences were replaced with “N's”: SINE/MIR & LINE/L2, LINE/L1, LTR/MaLR, LTR/Retroviral, Alu, and other low informational content sequences such as simple repeats. Below is the sequence following masking:

| | |
|---|---|
| [chemical structure] | (SEQ ID NO: 8828) |
| [chemical structure] | |
| [chemical structure] | |
| [chemical structure] | |
| [chemical structure] | |
| [chemical structure] | |
| [chemical structure] | |
| [chemical structure] | |
| [chemical structure] | |

[0694] The length of this sequence was determined using batch, automated computational methods and the sequence, as sense strand, its length, and the desired location of the probe sequence near the 3′ end of the mRNA was submitted to Array Designer Ver 1.1 (Premier Biosoft International, Palo Alto, Calif.). Search quality was set at 100%, number of best probes set at 1, length range set at 50 base pairs, Target Tm set at 75 C. degrees plus or minus 5 degrees, Hairpin max deltaG at 6.0-kcal/mol., Self dimmer max deltaG at 6.0-kcal/mol, Run/repeat (dinucleotide) max length set at 5, and Probe site minimum overlap set at 1. When none of the 49 possible probes met the criteria, the probe site would be moved 50 base pairs closer to the 5′ end of the sequence and resubmitted to Array Designer for analysis. When no possible probes met the criteria, the variation on melting temperature was raised to plus and minus 8 degrees and the number of identical basepairs in a run increased to 6 so that a probe sequence was produced.

[0695] In the sequence above, using the criteria noted above, Array Designer Ver 1.1 designed a probe corresponding to oligonucleotide number 2280 in Table 8 and is indicated by underlining in the sequence above. It has a melting temperature of 68.4 degrees Celsius and a max run of 6 nucleotides and represents one of the cases where the criteria for probe design in Array Designer Ver 1.1 were relaxed in order to obtain an oligonucleotide near the 3′ end of the mRNA (Low melting temperature was allowed).

Clone 463D12

[0696] Clone 463D12 was sequenced and compared to the nr, dbEST, and UniGene databases at NCBI using the BLAST search tool. The sequence matched accession number AI184553, an EST sequence with the definition line “qd60a05.x1 Soares_testis_NHT Homo sapiens cDNA clone IMAGE:1733840 3′ similar to gb:M29550 PROTEIN PHOSPHATASE 2B CATALYTIC SUBUNIT 1 (HUMAN); mRNA sequence.” The E value of the alignment was 1.00×10⁻¹¹⁸. The GenBank sequence begins with a poly-T region, suggesting that it is the antisense strand, read 5′ to 3′. The beginning of this sequence is complementary to the 3′ end of the mRNA sense strand. The accession number for this sequence was included in a text file of accession numbers representing antisense sequences. Sequences for antisense strand mRNAs were obtained by uploading a text file containing desired accession numbers as an Entrez search query using the Batch Entrez web interface and saving the results locally as a FASTA file. The following sequence was obtained, and the region of alignment of clone 463D12 is outlined:

| | |
|---|---|
| [chemical structure] | (SEQ ID NO: 8829) |
| [chemical structure] | |
| [chemical structure] | |

[0697] The FASTA file, including the sequence of AA184553, was then masked using the RepeatMasker web interface, as shown below. The region of alignment of clone 463D12 is outlined.

| | |
|---|---|
| [chemical structure] | (SEQ ID NO: 8830) |
| [chemical structure] | |
| [chemical structure] | |

[0698] The sequence was submitted to Array Designer as described above, however, the desired location of the probe was indicated at base pair 50 and if no probe met the criteria, moved in the 3′ direction. The complementary sequence from Array Designer was used, because the original sequence was antisense. The oligonucleotide designed by Array Designer corresponds to oligonucleotide number 4342 in Table 8 and is complementary to the underlined sequence above. The probe has a melting temperature of 72.7 degrees centigrade and a max run of 4 nucleotides.

Clone 72D4

[0699] Clone 72D4 was sequenced and compared to the nr, dbEST, and UniGene databases at NCBI using the BLAST search tool. No significant matches were found in any of these databases. When compared to the human genome draft, significant alignments were found to three consecutive regions of the reference sequence NT_{—}008060, as depicted below, suggesting that the insert contains three spliced exons of an unidentified gene.

[0700] Residue Numbers on Matching Residue

clone 72D4 sequence numbers on NT_008060

| | |
|---|---|
| 1-198 | 478646-478843 |
| 197-489 | 479876-480168 |
| 491-585 | 489271-489365 |

[0701] Because the reference sequence contains introns and may represent either the coding or noncoding strand for this gene, BioCardia's own sequence file was used to design the oligonucleotide. Two complementary probes were designed to ensure that the sense strand was represented. The sequence of the insert in clone 72D4 is shown below, with the three putative exons outlined.

| | |
|---|---|
| [chemical structure] | (SEQ ID NO: 8445) |

[0702] The sequence was submitted to RepeatMasker, but no repetitive sequences were found. The sequence shown above was used to design the two 50-mer probes using Array Designer as described above. The probes are shown in bold typeface in the sequence depicted below. The probe in the sequence is oligonucleotide number 6415 (SEQ ID NO: 6415) in Table 8 and the complementary probe is oligonucleotide number 6805 (SEQ ID NO:6805).

CAGGTCACACAGCACATCAGTGGCTACATGTGAGCTCAGACCTGGGTCTGCTGCTGTCT
GTCTTCCCAATATCCATGACCTTGACTGATGCAGGTGTCTAGGGATACGTCCATCCCCG
TCCTGCTGGAGCCCAGAGCACGGAAGCCTGGCCCTCCGAGGAGACAGAAGGGAGTGTCG
GACACCATGACGAGAGCTTGGCAGAATAAATAACTTCTTTAAACAATTTTACGGCATGA
AGAAATCTGGACCAGTTTATTAAATGGGATTTCTGCCACAAACCTTGGAAGAATCACAT
CATCTTANNCCCAAGTGAAAACTGTGTTGCGTAACAAAGAACATGACTGCGCTCCACAC
ATACATCATTGCCCGGCGAGGCGGGACACAAGTCAACGACGGAACACTTGAGACAGGCC
TACAACTGTGCACGGGTCAGAAGCAAGTTTAAGCCATACTTGCTGCAGTGAGACTACAT
TTCTGTCTATAGAAGATACCTGACTTGATCTGTTTTTCAGCTCCAGTTCCCAGATGTGC [symbol]
----GTCAAGGGTCTACACG
GTGTTGTGGTCCCCAAGTATCACCTTCCAATTTCTGGGAG--→
CACAACACCAGGGGTTCATAGTGGAAGGTTAAAG-5′
CAGTGCTCTGGCCGGATCCTTGCCGCGCGGATAAAAACT---→

[0703] Confirmation of Probe Sequence

[0704] Following probe design, each probe sequence was confirmed by comparing the sequence against dbEST, the UniGene cluster set, and the assembled human genome using BLASTn at NCBI. Alignments, accession numbers, gi numbers, UniGene cluster numbers and names were examined and the most common sequence used for the probe. The final probe set was compiled into Table 8.

### Example 22

### Production of an Array of 8000 Spotted 50mer Oligonucleotides

[0705] We produced an array of 8000 spotted 50mer oligonucleotides. Examples 20 and 21 exemplify the design and selection of probes for this array.

[0706] Sigma-Genosys (The Woodlands, Tex.) synthesized unmodified 50-mer oligonucleotides using standard phosphoramidite chemistry, with a starting scale of synthesis of 0.05 μmole (see, e.g., R. Meyers, ed. (1995) Molecular Biology and Biotechnology: A Comprehensive Desk Reference). Briefly, to begin synthesis, a 3′ hydroxyl nucleoside with a dimethoxytrityl (DMT) group at the 5′ end was attached to a solid support. The DMT group was removed with trichloroacetic acid (TCA) in order to free the 5′-hydroxyl for the coupling reaction. Next, tetrazole and a phosphoramidite derivative of the next nucleotide were added. The tetrazole protonates the nitrogen of the phosphoramidite, making it susceptible to nucleophilic attack. The DMT group at the 5′-end of the hydroxyl group blocks further addition of nucleotides in excess. Next, the inter-nucleotide linkage was converted to a phosphotriester bond in an oxidation step using an oxidizing agent and water as the oxygen donor. Excess nucleotides were filtered out and the cycle for the next nucleotide was started by the removal of the DMT protecting group. Following the synthesis, the oligo was cleaved from the solid support. The oligonucleotides were desalted, resuspended in water at a concentration of 100 or 200 μM, and placed in 96-deep well format. The oligonucleotides were re-arrayed into Whatman Uniplate 384-well polyproylene V bottom plates. The oligonucleotides were diluted to a final concentration 30 μM in IX Micro Spotting Solution Plus (Telechem/arrayit.com, Sunnyvale, Calif.) in a total volume of 15 μl. In total, 8,031 oligonucleotides were arrayed into twenty-one 384-well plates.

[0707] Arrays were produced on Telechem/arrayit.com Super amine glass substrates (Telechem/arrayit.com), which were manufactured in 0.1 mm filtered clean room with exact dimensions of 25×76×0.96 mm. The arrays were printed using the Virtek Chipwriter with a Telechem 48 pin Micro Spotting Printhead. The Printhead was loaded with 48 Stealth SMP3B TeleChem Micro Spotting Pins, which were used to print oligonucleotides onto the slide with the spot size being 110-115 microns in diameter.

### Example 23

### Amplification, Labeling, and Hybridization of Total RNA to an Oligonucleotide Microarray

[0708] Amplification, Labeling, Hybridization and Scanning

[0709] Samples consisting of at least 2 μg of intact total RNA were further processed for array hybridization. Amplification and labeling of total RNA samples was performed in three successive enzymatic reactions. First, a single-stranded DNA copy of the RNA was made (hereinafter, “ss-cDNA”). Second, the ss-cDNA was used as a template for the complementary DNA strand, producing double-stranded cDNA (hereinafter, “ds-cDNA, or cDNA”). Third, linear amplification was performed by in vitro transcription from a bacterial T₇ promoter. During this step, fluorescent-conjugated nucleotides were incorporated into the amplified RNA (hereinafter, “aRNA”).

[0710] The first strand cDNA was produced using the Invitrogen kit (Superscript II). The first strand cDNA was produced in a reaction composed of 50 mM Tris-HCl (pH 8.3), 75 mM KCl, and 3 mM MgCl₂ (1× First Strand Buffer, Invitrogen), 0.5 mM dGTP, 0.5 mM dATP, 0.5 mM dTTP, 0.5 mM dCTP, 10 mM DTT, 10 U reverse transcriptase (Superscript II, Invitrogen, #18064014), 15 U RNase inhibitor (RNAGuard, Amersham Pharmacia, #27-0815-01), 5 μM T7T24 primer (5′-GGCCAGTGAATTGTAATACGACTCACTATAGGGAGGCGGTTTTTTTTTTTT TTTTTTTTTTTT-3′), (SEQ ID NO:8831) and 2 μg of selected sample total RNA. Several purified, recombinant control mRNAs from the plant Arabidopsis thaliana were added to the reaction mixture: 20 pg of CAB and RCA, 14 pg of LTP4 and NAC1, and 2 pg of RCP1 and XCP2 (Stratagene, #252201, #252202, #252204, #252208, #252207, #252206 respectively). The control RNAs allow the estimate of copy numbers for individual mRNAs in the clinical sample because corresponding sense oligonucleotide probes for each of these plant genes are present on the microarray. The final reaction volume of 40 μl was incubated at 42° C. for 60 min.

[0711] For synthesis of the second cDNA strand, DNA polymerase and RNase were added to the previous reaction, bringing the final volume to 150 μl. The previous contents were diluted and new substrates were added to a final concentration of 20 mM Tris-HCl (pH 7.0) (Fisher Scientific, Pittsburgh, Pa. #BP1756-100), 90 mMKCl (Teknova, Half Moon Bay, Calif., #0313-500), 4.6 mM MgCl₂ (Teknova, Half Moon Bay, Calif., #0304-500), 10 mM (NH₄)₂SO₄ (Fisher Scientific #A702-500)(1× Second Strand buffer, Invitrogen), 0.266 mM dGTP, 0.266 mM dATP, 0.266 mM dTTP, 0.266 mM dCTP, 40 U E. coli DNA polymerase (Invitrogen, #18010-025), and 2 U RNaseH (Invitrogen, #18021-014). The second strand synthesis took place at 16° C. for 120 minutes.

[0712] Following second-strand synthesis, the ds-cDNA was purified from the enzymes, dNTPs, and buffers before proceeding to amplification, using phenol-chloroform extraction followed by ethanol precipitation of the cDNA in the presence of glycogen.

[0713] Alternatively, a silica-gel column is used to purify the cDNA (e.g. Qiaquick PCR cleanup from Qiagen, #28104). The cDNA was collected by centrifugation at >10,000×g for 30 minutes, the supernatant is aspirated, and 150 μl of 70% ethanol, 30% water was added to wash the DNA pellet. Following centrifugation, the supernatant was removed, and residual ethanol was evaporated at room temperature.

[0714] Linear amplification of the cDNA was performed by in vitro transcription of the cDNA. The cDNA pellet from the step described above was resuspended in 7.4 μl of water, and in vitro transcription reaction buffer was added to a final volume of 20 μl containing 7.5 mM GTP, 7.5 mM ATP, 7.5 mM TTP, 2.25 mM CTP, 1.025 mM Cy3-conjugated CTP (Perkin Elmer; Boston, Mass., #NEL-580), 1× reaction buffer (Ambion, Megascript Kit, Austin, Tex. and #1334) and 1% T₇ polymerase enzyme mix (Ambion, Megascript Kit, Austin, Tex. and #1334). This reaction was incubated at 37° C. overnight. Following in vitro transcription, the RNA was purified from the enzyme, buffers, and excess NTPs using the RNeasy kit from Qiagen (Valencia, Calif.; # 74106) as described in the vendor's protocol. A second elution step was performed and the two eluates were combined for a final volume of 60 μl. RNA is quantified using an Agilent 2100 bioanalyzer with the RNA 6000 nano LabChip.

[0715] Reference RNA was prepared as described above, except that 10 μg of total RNA was the starting material for amplification, and Cy5-CTP was incorporated instead of Cy3CTP. Reference RNA from five reactions was pooled together and quantitated as described above.

[0716] Hybridization to an Array

[0717] RNA was prepared for hybridization as follows: for an 18 mm×55 mm array, 20 μg of amplified RNA (aRNA) was combined with 20 μg of reference aRNA. The combined sample and reference aRNA was concentrated by evaporating the water to 5 μl in a vacuum evaporator. Five μl of 20 mM zinc acetate was added to the aRNA and the mix incubated at 60° C. for 10 minutes to fragment the RNA into 50-200 bp pieces. Following the incubation, 40 μl of hybridization buffer was added to achieve final concentrations of 5×SSC and 0.20% SDS with 0.1 μg/ul of Cot-1 DNA (Invitrogen) as a competitor DNA. The final hybridization mix was heated to 98° C., and then reduced to 50° C. at 0.1 C per second.

[0718] Alternatively, formamide is included in the hybridization mixture to lower the hybridization temperature.

[0719] The hybridization mixture was applied to the microarray surface, covered with a glass coverslip (Corning, #2935-246), and incubated in a humidified chamber (Telechem, AHC-10) at 62° C. overnight. Following incubation, the slides were washed in 2×SSC, 0.1% SDS for two minutes, then in 2×SSC for two minutes, then in 0.2×SSC for two minutes. The arrays were spun at 1000×g for 2 minutes to dry them. The dry microarrays are then scanned by methods described above.

### Example 24

### Analysis of Human Transplant Patient Mononuclear Cell RNA Hybridized to a 24,000 Feature Microarray

[0720] Patients who had recently undergone cardiac transplant and were being monitored for rejection by biopsy were selected and enrolled in a clinical study, as described in Example 11. Blood was drawn from several patients and mononuclear cells isolated as described in Example 8. The rejection grade determined from the biopsy is presented in Table 9 for some of the patient samples. Four samples (14-0001-2, 14-0001-3, 14-0005-1 and 14-0005-2) from one center were selected for further examination. Two sets of paired samples were available that allowed comparison of severe rejection (rejection grade 3A) to minimal or no rejection (rejection grade 1 or 0). These two groups are designated “high rejection grade” and “low rejection grade”, respectively.

[0721] Additional RNA was isolated from the mononuclear cells of enrolled cardiac allograft recipients as described in Example 8. The yield of RNA from 8 ml of blood is shown in Table 9, below.

[0722] 1 or 2 μg of total RNA was amplified by making cDNA copies using a T7T24 primer and subsequent in vitro transcription, as described in Example 23. This “target” amplified RNA was labeled by incorporation of Cy3-conjugated nucleotides, as described in Example 23. The amplified RNA was quantified by analysis at A260 on a spectrophotometer.

[0723] Hybridization to the 8,000 probe (24,000-feature) microarray (described in Examples 20-22) was performed essentially as described in Example 23. 20 μg of amplified and labeled RNA was combined with 20 μg of R50 reference RNA that was labeled and prepared as described in Example 9.

[0724] The sample and reference amplified and labeled RNAs were combined and fragmented at 95° C. for 30 min, as described in Example 23. The fragmented RNA was mixed with 40 μl of hybridization solution (to bring the total to 50 μl) and applied to the 8,000-probe, 24,000-feature microarray and covered with a 21 mm×60 mm coverslip. The arrays were hybridized overnight and washed as described in Example 23.

[0725] Once hybridized and washed, the arrays were scanned as described in Example 23. The full image produced by the Agilent scanner G2565AA was flipped, rotated, and split into two images (one for each signal channel) using TIFFSplitter (Agilent, Palo Alto, Calif.). The two channels are the output at 532 nm (Cy3-labeled sample) and 633 nm (Cy5-labeled R50). The individual images were loaded into GenePix 3.0 (Axon Instruments, Union City, Calif.) and the software was used to determine the median pixel intensity for each feature (Fᵢ) and the median pixel intensity of the local background for each feature (Bᵢ) in both channels. The standard deviation (SDF_{i and} SDBᵢ) for each is also determined. Features for which GenePix could not discriminate the feature from the background were “flagged”, and the data were deleted from further consideration.

[0726] From the remaining data, the following calculations were performed.

[0727] The first calculation performed was the signal to noise ratio:

$$S / N = \frac{{F}_{i} - {B}_{i}}{{SDB}_{i}}$$

[0728] All features with a S/N less than 3 in either channel were removed from further consideration. All features that did not have GenePix flags and passed the S/N test were considered usable features. The background-subtracted signal (hereinafter, “BGSS”) was calculated for each usable feature in each channel (BGSSᵢ=Fᵢ−Bᵢ).

[0729] The BGSS was used for the scaling step within each channel. The median BGSS for all usable features was calculated. The BGSSᵢ for each feature was divided by the median BGSS. The median BGSS for the scaled data then became 1 for each channel on each array. This operation did not change the distribution of the data, but did allow each to be directly compared

[0730] The scaled BGSSᵢ (Sᵢ) for each feature was used to calculate the ratio of the Cy3 to the Cy5 signal:

$${R}_{n} = \frac{Cy 3 {S}_{i}}{Cy 5 {S}_{i}}$$

[0731] The ratio data from the triplicate features were combined for each probe on the array. If all three features were still usable, their average was taken (Rₚ) and the coefficient of variation (hereinafter “CV”) was determined. If the CV was less than 15%, the average was carried forward for that probe. If the CV was greater than 15% for the triplicate features, then the average of the two features with the closest Rₙ values were used. If there were only two usable features for a given probe, the average of the two features was used. If there was only one usable feature for a given probe, the value of that feature was used.

[0732] The logarithm of the average ratio was taken for each probe (log Rₚ). This value was used for comparison among arrays. For comparison of gene expression in high rejection grade patients to gene expression from low rejection grade patients, the average was taken for each probe for hybridizations 107739 and 107741 (high rejection grades) and 107740 and 107742 (low rejection grades). Since there were only two patients, each with a change from high to low rejection grade, there should be less variability in the data than if all four samples were from different patients. The results of this comparison were plotted in FIG. 9. The X-axis is the high rejection grade average (the average of each probe for hybridizations of samples from high rejection grade patients) and the Y-axis is the low rejection grade average. There was complete data for 5562 probes, all plotted in FIG. 9. Each “point” in the graph corresponded to a probe on the microarray.

[0733] A “cluster” of points were shaded in white. Points within the cluster represented genes with expression that is not significantly changed from one sample group to the other. The far ends of the cluster corresponded to genes that are expressed at either low or high levels in each group.

[0734] Outlier points, corresponding to genes with differential expression between high and low rejection grade patients, were shaded black and are further described in Table 10. There was one point above the cluster (indicating that expression was relatively higher in the low rejection grade than in the low rejection grade), and 7 points below the cluster (indicating that expression was relatively higher in the high rejection grade than in the low rejection grade).

[0735] Many of the differentially expressed genes had unknown or poorly described functions. One, corresponding to probe number 8091, was known in the public databases only as a predicted mRNA and protein.

[0736] Using the data from samples 107739 (Grade 3A rejection) and 107742 (Grade 0), a scaled ratio of sample (Cy3) to reference (Cy5) expression was determined using the same techniques. The ratio of was taken of these scaled ratios, denoted “the ratio of scaled ratios (hereinafter, “SR”). Replicate features were not combined and all probes with S/N<3 in either channel were filtered out. Some probes with differential expression between these two samples are shown in FIG. 10. In this Figure, the probes are sorted from the top to the bottom by relative expression in the first grade 0 sample vs grade 3A (ratio of SRs, grade 0/3A).

[0737] Diagnostic accuracy for sample classification is determined using additional samples and suitable methods for correlation analysis.

[0738] Comparing FIG. 10 and Table 10, genes of particular interest include those corresponding to SEQ ID NO:2476, SEQ ID NO: 2407, SEQ ID NO:2192, SEQ ID NO: 2283, SEQ ID NO:6025, SEQ ID NO: 4481, SEQ ID NO:3761, SEQ ID NO: 3791, SEQ ID NO:4476, SEQ ID NO: 4398, SEQ ID NO:7401, SEQ ID NO: 1796, SEQ ID NO:4423, SEQ ID NO: 4429, SEQ ID NO:4430, SEQ ID NO: 4767, SEQ ID NO:4829 and SEQ ID NO: 8091.

LENGTHY TABLE REFERENCED HERE
US20070037144A1-20070215-T00001
Please refer to the end of the specification for access instructions.

LENGTHY TABLE REFERENCED HERE
US20070037144A1-20070215-T00002
Please refer to the end of the specification for access instructions.

LENGTHY TABLE REFERENCED HERE
US20070037144A1-20070215-T00003
Please refer to the end of the specification for access instructions.

LENGTHY TABLE REFERENCED HERE
US20070037144A1-20070215-T00004
Please refer to the end of the specification for access instructions.

LENGTHY TABLE REFERENCED HERE
US20070037144A1-20070215-T00005
Please refer to the end of the specification for access instructions.

LENGTHY TABLE REFERENCED HERE
US20070037144A1-20070215-T00006
Please refer to the end of the specification for access instructions.

LENGTHY TABLE REFERENCED HERE
US20070037144A1-20070215-T00007
Please refer to the end of the specification for access instructions.

LENGTHY TABLE REFERENCED HERE
US20070037144A1-20070215-T00008
Please refer to the end of the specification for access instructions.

LENGTHY TABLE REFERENCED HERE
US20070037144A1-20070215-T00009
Please refer to the end of the specification for access instructions.

LENGTHY TABLE REFERENCED HERE
US20070037144A1-20070215-T00010
Please refer to the end of the specification for access instructions.

LENGTHY TABLE REFERENCED HERE
US20070037144A1-20070215-T00011
Please refer to the end of the specification for access instructions.

LENGTHY TABLE REFERENCED HERE
US20070037144A1-20070215-T00012
Please refer to the end of the specification for access instructions.

LENGTHY TABLE
The patent application contains a lengthy table section. A copy of the table is available in electronic form from the USPTO web site (http://seqdata.uspto.gov/?pageRequest=docDetail&DocID=US20070037144A1) An electronic copy of the table will also be available from the USPTO upon request and payment of the fee set forth in 37 CFR 1.19(b)(3).

We claim:

1. A system for detecting gene expression comprising at least two isolated DNA molecules wherein each isolated DNA molecule detects expression of a gene wherein said gene is selected from the group of genes corresponding to the oligonucleotides depicted in SEQ ID NO:1-SEQ ID NO: 8143.

2. The system of claim 1 wherein said gene is selected from the group of genes corresponding to the oligonucleotides depicted in SEQ ID NO:2476, SEQ ID NO: 2407, SEQ ID NO:2192, SEQ ID NO: 2283, SEQ ID NO:6025, SEQ ID NO: 4481, SEQ ID NO:3761, SEQ ID NO: 3791, SEQ ID NO:4476, SEQ ID NO: 4398, SEQ ID NO:7401, SEQ ID NO: 1796, SEQ ID NO:4423, SEQ ID NO: 4429, SEQ ID NO:4430, SEQ ID NO: 4767, SEQ ID NO:4829, and SEQ ID NO: 8091.

3. The system of claim 1 wherein the DNA molecules are synthetic DNA, genomic DNA, PNA or cDNA.

4. The system of claim 1 wherein the isolated DNA molecules are immobilized on an array.

5. The system of claim 4 wherein the array is selected from the group consisting of a chip array, a plate array, a bead array, a pin array, a membrane array, a solid surface array, a liquid array, an oligonucleotide array, polynucleotide array or a cDNA array, a microtiter plate, a membrane and a chip.

6. A method of detecting gene expression comprising a) isolating RNA and b) hybridizing said RNA to the isolated DNA molecules of claim 1.

7. A method of detecting gene expression comprising a) isolating RNA; b) converting said RNA to nucleic acid derived from the RNA and c) hybridizing said nucleic acid derived from the RNA to the isolated DNA molecules of claim 1.

8. The method of claim 7 wherein said nucleic acid derived from the RNA is cDNA.

9. A method of detecting gene expression comprising a) isolating RNA; b) converting said RNA to cRNA or aRNA and c) hybridizing said cRNA or aRNA to the isolated DNA molecules of claim 1.

10. A candidate library comprising at least two isolated oligonucleotides wherein the oligonucleotides have nucleotide sequences having at least 40-50, 50-60, 70-80, 80-85, 85-90, 90-95 or 95-100% sequence identity to the nucleotide sequences selected from the group consisisting of SEQ ID NO:1-SEQ ID NO: 8143.

11. The candidate library of claim 10, wherein the nucleotide sequence comprises deoxyribonucleic acid (DNA) sequence, ribonucleic acid (RNA) sequence, synthetic oligonucleotide sequence, protein nucleic acid (PNA) sequence or genomic DNA sequence.

12. The candidate library of claim 11, wherein the candidate library is immobilized on an array.

13. The candidate library of claim 12, wherein the array is selected from the group consisting of: a chip array, a plate array, a bead array, a pin array, a membrane array, a solid surface array, a liquid array, an oligonucleotide array, polynucleotide array or a cDNA array, a microtiter plate, a membrane and a chip.

14. A diagnostic oligonucleotide for a disease comprising an oligonucleotide wherein the oligonucleotide has a nucleotide sequence selected from the group consisting of SEQ ID NO:1-SEQ ID NO: 8143 wherein said oligonucleotide detects expression of a gene that is differentially expressed in leukocytes in an individual with at least one disease criterion for at least one leukocyte-related disease compared to the expression of said gene in an individual without the at least one disease criterion, wherein expression of the gene is correlated with the at least one disease criterion.

15. The diagnostic oligonucleotide of claim 14, wherein the nucleotide sequence comprises DNA, cDNA, PNA, genomic DNA, or synthetic oligonucleotides.

16. The diagnostic oligonucleotide of claim 14, wherein the disease criterion comprises data wherein the data is selected from physical examination data, laboratory data, patient historic, diagnostic, prognostic, risk prediction, therapeutic progress, and therapeutic outcome data.

17. The diagnostic oligonucleotide of claim 14, wherein the leukocytes comprise peripheral blood leukocytes or leukocytes derived from a non-blood fluid.

18. The diagnostic oligonucleotide of claim 17, wherein the non-blood fluid is isolated from the colon, sinus, esophagus, small bowel, pancreatic duct, biliary tree, ureter, vagina, cervix uterus, nose, ear, urethra, eye, open wound, abscess, stomach, cerebral spinal fluid, peritoneal fluid, pleural fluid, synovial fluid, bone marrow and pulmonary lavage.

19. The diagnostic oligonucleotide of claim 14, wherein the leukocytes comprise leukocytes derived from urine or a biopsy sample.

20. The diagnostic oligonucleotide of claim 14, wherein the leukocytes are peripheral blood mononuclear cells or T-lymphocytes.

21. The diagnostic oligonucleotide of claim 14, wherein the disease is selected from the group consisting of cardiac allograft rejection, kidney allograft rejection, liver allograft rejection, atherosclerosis, congestive heart failure, systemic lupus erythematosis (SLE), rheumatoid arthritis, osteoarthritis, and cytomegalovirus infection.

22. The diagnostic oligonucleotide of claim 14, wherein the differential expression is one or more of: a relative increase in expression, a relative decrease in expression, presence of expression or absence of expression.

23. A diagnostic agent comprising an oligonucleotide wherein the oligonucleotide has a nucleotide sequence selected from the group consisting of SEQ ID NO: 1-SEQ ID NO: 8143 wherein said oligonucleotide detects expression of a gene that is differentially expressed in leukocytes in an individual over time.

24. The agent of claim 23 wherein said oligonucleotide is selected from the group consisting of SEQ ID NO:2476, SEQ ID NO: 2407, SEQ ID NO:2192, SEQ ID NO:2283, SEQ ID NO:6025, SEQ ID NO:4481, SEQ ID NO:3761, SEQ ID NO:3791, SEQ ID NO:4476, SEQ ID NO:4398, SEQ ID NO:7401, SEQ ID NO: 1796, SEQ ID NO:4423, SEQ ID NO:4429, SEQ ID NO:4430, SEQ ID NO:4767, SEQ ID NO:4829, and SEQ ID NO:8091.

25. A diagnostic probe set for a disease comprising at least two probes wherein each probe detects expression of a gene wherein the gene is selected from the group of genes corresponding to the oligonucleotides depicted in SEQ ID NO: 1-SEQ ID NO:8143 wherein each gene is differentially expressed in leukocytes in an individual with at least one disease criterion for a disease selected from Table 1 as compared to the expression of the gene in leukocytes in an individual without the at least one disease criterion, wherein expression of the gene is correlated with the at least one disease criterion.

26. An isolated nucleic acid wherein said nucleic acid comprises a sequence depicted in SEQ ID NO:8144-SEQ ID NO:8766.

27. An expression vector containing the nucleic acid of claim 26 in operative association with a regulatory element which controls expression of the nucleic acid in a host cell.

28. A host cell comprising the expression vector of claim 27.

29. The host cell of claim 27, wherein the host cell is a prokaryotic cell or a eukaryotic cell.

30. A kit comprising the system of claim 1.

31. A system for detecting gene expression in leukocytes comprising an isolated DNA molecule wherein said isolated DNA molecule detects expression of a gene wherein said gene is selected from the group of genes corresponding to the oligonucleotides depicted in SEQ ID NO: 1-SEQ ID NO: 8143 and said gene is differentially expressed in said leukocytes in an individual with at least one disease criterion for a disease selected from Table 1 compared to the expression of said gene in leukocytes in an individual without the at least one disease criterion.

32. The system of claim 31 wherein the DNA molecule is at least 16 nucleotides in length.

33. The system of claim 31 wherein the DNA molecules are synthetic DNA, genomic DNA, PNA or cDNA.

34. The system of claim 31 wherein the isolated DNA molecule is immobilized on an array.

35. The system of claim 34 wherein the array is selected from the group consisting of a chip array, a plate array, a bead array, a pin array, a membrane array, a solid surface array, a liquid array, an oligonucleotide array, polynucleotide array or a cDNA array, a microtiter plate, a membrane and a chip.

36. A method of detecting gene expression comprising a) isolating RNA and b) hybridizing said RNA to the isolated DNA molecule of claim 31.

37. A method of detecting gene expression comprising a) isolating RNA; b) converting said RNA to nucleic acid derived from the RNA and c) hybridizing said nucleic acid derived from said RNA to the isolated DNA molecules of claim 31.

38. The method of claim 37 wherein said nucleic acid derived from the RNA is cDNA.

39. A method of detecting gene expression comprising a) isolating RNA; b) converting said RNA to cRNA or aRNA and c) hybridizing said cRNA or aRNA to the isolated DNA molecule of claim 31.

40. A method of diagnosing a disease comprising obtaining a leukocyte sample from an individual, contacting said leukocyte sample with the gene expression system of claim 31 and comparing the expression of the gene with a molecular signature indicative of the presence or absence of said disease.

41. A method of monitoring progression of a disease comprising: obtaining a leukocyte sample from an individual, contacting said leukocyte sample with the gene expression system of claim 31, and comparing the expression of the gene with a molecular signature indicative of the presence or absence of disease progression.

42. A method of monitoring the rate of progression of a disease comprising: obtaining a leukocyte sample from an individual, contacting said leukocyte sample with the gene expression system of claim 31, and comparing the expression of the gene with a molecular signature indicative of the presence or absence of disease progression.

43. A method of predicting therapeutic outcome comprising: obtaining a leukocyte sample from an individual, contacting said leukocyte sample with the gene expression system of claim 31, and comparing the expression of the gene with a molecular signature indicative of the predicted therapeutic outcome.

44. A method of determining prognosis for a patient comprising obtaining a leukocyte sample from a patient, contacting said leukocyte sample with the gene expression system of claim 31, and comparing the expression of the gene, and comparing the expression of the gene with a molecular signature indicative of the prognosis.

45. A method of predicting disease complications in an individual comprising obtaining a leukocyte sample from an individual, contacting said leukocyte sample with the gene expression system of claim 31, and comparing the expression of the gene with a molecular signature indicative of the presence or absence of disease complications.

46. A method of monitoring response to treatment in an individual, comprising obtaining a leukocyte sample from an individual, contacting said leukocyte sample with the gene expression system of claim 31, and comparing the expression of the gene with a molecular signature indicative of the presence or absence of response to treatment.

47. The method according to claim 46, wherein said method further comprises characterizing the genotype of the individual, and comparing the genotype of the individual with a diagnostic genotype, wherein the diagnostic genotype is correlated with at least one disease criterion.

48. The method according to claim 41, wherein said method further comprises characterizing the genotype of the individual, and comparing the genotype of the individual with a diagnostic genotype, wherein the diagnostic genotype is correlated with at least one disease criterion.

49. The method according to claim 42, wherein said method further comprises characterizing the genotype of the individual, and comparing the genotype of the individual with a diagnostic genotype, wherein the diagnostic genotype is correlated with at least one disease criterion.

50. The method according to claim 43, wherein said method further comprises characterizing the genotype of the individual, and comparing the genotype of the individual with a diagnostic genotype, wherein the diagnostic genotype is correlated with at least one disease criterion.

51. The method according to claim 44; wherein said method further comprises characterizing the genotype of the individual, and comparing the genotype of the individual with a diagnostic genotype, wherein the diagnostic genotype is correlated with at least one disease criterion.

52. The method of claim 50, wherein the genotype is analyzed by one or more methods selected from the group consisting of Southern analysis, RFLP analysis, PCR, single stranded conformation polymorphism, and SNP analysis.

53. A method of RNA preparation suitable for diagnostic expression profiling comprising: obtaining a leukocyte sample from a subject, adding actinomycin-D to a final concentraion of 1 ug/ml, adding cycloheximide to a final concentration of 10 ug/ml, and extracting RNA from the leukocyte sample.

54. The method of claim 52, wherein the actinomycin-D and cycloheximide are present in a sample tube to which the leukocyte sample is added.

The application's sequence listing, which the Patent Office published only in electronic form, follows.

SEQUENCE LISTING (8832 sequences)

SEQ ID NO: 1 - DNA, 50 bp, Homo sapiens
agagcacttgcagagcctgggacaacctccttattgaagggaagagggac

SEQ ID NO: 2 - DNA, 50 bp, Homo sapiens
tggtctcaaagatttacatggcaacattcgaaagtccccagagaagtcct

SEQ ID NO: 3 - DNA, 50 bp, Homo sapiens
aggacttctctggggactttcgaatgttgccatgtaaatctttgagacca

SEQ ID NO: 4 - DNA, 50 bp, Homo sapiens
aggtgccagcaactgaataaatacctctcccagtgtaaatctggagccaa

SEQ ID NO: 5 - DNA, 50 bp, Homo sapiens
gggtgtctttaaatagcactagccaaatcacatatctccaacactcctta

SEQ ID NO: 6 - DNA, 50 bp, Homo sapiens
taaggagtgttggagatatgtgatttggctagtgctatttaaagacaccc

SEQ ID NO: 7 - DNA, 50 bp, Homo sapiens
cccacagtgcaattcagaatatgctcagggaatgccagccaccttgtaaa

SEQ ID NO: 8 - DNA, 50 bp, Homo sapiens
gccaagacaataagctaggctactgggtccagctactactttggtgggat

SEQ ID NO: 9 - DNA, 50 bp, Homo sapiens
atcccaccaaagtagtagctggacccagtagcctagcttattgtcttggc

SEQ ID NO: 10 - DNA, 50 bp, Homo sapiens
aatttataactcctaggggttatttctgtgccagacacattccacctctc

SEQ ID NO: 11 - DNA, 50 bp, Homo sapiens
actaattgcattggcagcattgtgtctttgaccttgtatactagcttgac

SEQ ID NO: 12 - DNA, 50 bp, Homo sapiens
aaaccaaaaataatcacaacagaaaccagctgccccaaaggaaccagagg

SEQ ID NO: 13 - DNA, 50 bp, Homo sapiens
tcccaccaggactttgctaacaataatgtttggaaataaagaagtgctct

SEQ ID NO: 14 - DNA, 50 bp, Homo sapiens
tgacactcatgccaacaagaacctgtgcccctccttcctaacctgaggcc

SEQ ID NO: 15 - DNA, 50 bp, Homo sapiens
acaaattttaccctaacagttttaccacctagcaacagtcatttctgaaa

SEQ ID NO: 16 - DNA, 50 bp, Homo sapiens
tttattggtacttcctaaagatagagactaaagtcatggtagtattggcc

SEQ ID NO: 17 - DNA, 50 bp, Homo sapiens
ggccaatactaccatgactttagtctctatctttaggaagtaccaataaa

SEQ ID NO: 18 - DNA, 50 bp, Homo sapiens
cctcccattttgttctcggaagattaaatgctacatgtgtaagtctgcct

SEQ ID NO: 19 - DNA, 50 bp, Homo sapiens
ccgtgcccggaaacaggccgtggctagagaagagcgagatcatctttacc

SEQ ID NO: 20 - DNA, 50 bp, Homo sapiens
ggtctaatttattcaaagggggcaagaagtagcagtgtctgtaaaagagc

SEQ ID NO: 21 - DNA, 50 bp, Homo sapiens
agatgggtgaatcagttgggttttgtaaatacttgtatgtggggaagaca

SEQ ID NO: 22 - DNA, 50 bp, Homo sapiens
tctctagttgtcactttcctcttccactttgataccattgggtcattgaa

SEQ ID NO: 23 - DNA, 50 bp, Homo sapiens
tcaaaagaaagccttctggatgctgttaagatgtacccttcaggtgaacc

SEQ ID NO: 24 - DNA, 50 bp, Homo sapiens
ccccctttccttctaatttttcagctccttcaatgcaaagtacatgtatt

SEQ ID NO: 25 - DNA, 50 bp, Homo sapiens
cctccaaccccggaaacttcctgtgcaacccagactatcacctttgaaag

SEQ ID NO: 26 - DNA, 50 bp, Homo sapiens
ggaaggtagtcttcatttgcaatcaggaaaacgaacgtaaaggcacaggt

SEQ ID NO: 27 - DNA, 50 bp, Homo sapiens
acctgtgcctttacgttcgttttcctgattgcaaatgaagactaccttcc

SEQ ID NO: 28 - DNA, 50 bp, Homo sapiens
tgttttcctcactacattgtacatgtgggaattacagataaacggaagcc

SEQ ID NO: 29 - DNA, 50 bp, Homo sapiens
cagagcaagaccctgaagacccccaaccacggcctaaaagcctctttgtg

SEQ ID NO: 30 - DNA, 50 bp, Homo sapiens
gcttcatatgtatggctgttgctttgcttcatgtgtatggctatttgtat

SEQ ID NO: 31 - DNA, 50 bp, Homo sapiens
cagatgggttcagcagtctggtcagtgagaaagggccgagggtagacagg

SEQ ID NO: 32 - DNA, 50 bp, Homo sapiens
tccagggcaatcaatgttcacgcaacttgaaattatatctgtggtcttca

SEQ ID NO: 33 - DNA, 50 bp, Homo sapiens
tcatcccgagaacattggcttccacatcacagtatctacccttacatggt

SEQ ID NO: 34 - DNA, 50 bp, Homo sapiens
cgctctcgatattcctgtgcagaaacctggaccacgtctacaaccggctc

SEQ ID NO: 35 - DNA, 50 bp, Homo sapiens
cctgctcagctctgcataagtaattcaagaaatgggaggcttcaccttaa

SEQ ID NO: 36 - DNA, 50 bp, Homo sapiens
ggaggacccacactgctacacttctgatcccctttggttttactacccaa

SEQ ID NO: 37 - DNA, 50 bp, Homo sapiens
gaagaacagcagatggcggtgatcagcagagagattgaactttgaggagg

SEQ ID NO: 38 - DNA, 50 bp, Homo sapiens
ggaatttcctatcttgcagcatcctgtaaataaacattcaagtccaccct

SEQ ID NO: 39 - DNA, 50 bp, Homo sapiens
cctcaaagtgctaccgataaacctttctaattgtaagtgcccttactaag

SEQ ID NO: 40 - DNA, 50 bp, Homo sapiens
agtgggtcccagattggctcacactgagaatgtaagaactacaaacaaaa

SEQ ID NO: 41 - DNA, 50 bp, Homo sapiens
ctgtccagcgccaacagcctctatgacgacatcgagtgcttccttatgga

SEQ ID NO: 42 - DNA, 50 bp, Homo sapiens
aaattctggtaagtatgtgcttttctgtgggggtgggatttggaaggggg

SEQ ID NO: 43 - DNA, 50 bp, Homo sapiens
atgggtgaagagaaccgagcaaagatcaaaataaaaagtgacacagcagc

SEQ ID NO: 44 - DNA, 50 bp, Homo sapiens
gctgtgtccatctttgtcactgagtgaaatctctgttttctattctctga

SEQ ID NO: 45 - DNA, 50 bp, Homo sapiens
atgtgctgtcaaaacaagtttttctgtcaagaagatgatcagaccttgga

SEQ ID NO: 46 - DNA, 50 bp, Homo sapiens
cagtgatcagggtcctgcaagcagtggggaagggggccaaggtattggag

SEQ ID NO: 47 - DNA, 50 bp, Homo sapiens
tggacacacggatcaagaccaggaagaattgaacttgtcaaggtgaaggg

SEQ ID NO: 48 - DNA, 50 bp, Homo sapiens
aacagaccccctctagaaatttttcagatgcttctgggagacaccaaagg

SEQ ID NO: 49 - DNA, 50 bp, Homo sapiens
gtcagtaggtgcggtgtctagggtagtgaatcctgtaagttcaaatttat

SEQ ID NO: 50 - DNA, 60 bp, Homo sapiens
agttgtgtggtcagtaggtgcggtgtctagggtagtgaatcctgtaagttcaaatttatg

SEQ ID NO: 51 - DNA, 70 bp, Homo sapiens
tttaagttgtgtggtcagtaggtgcggtgtctagggtagtgaatcctgtaagttcaaatttatgattagg

SEQ ID NO: 52 - DNA, 50 bp, Homo sapiens
gtttgagatggacacactggtgtggattaacctgccagggagacagagct

SEQ ID NO: 53 - DNA, 50 bp, Homo sapiens
ttgtgactctgaatcccatgttctcaaactacgctgccttccgaagtctg

SEQ ID NO: 54 - DNA, 50 bp, Homo sapiens
tttaagtactaagtcatcatttgccttgaaagtttcctctgcattgggtt

SEQ ID NO: 55 - DNA, 50 bp, Homo sapiens
aacccaatgcagaggaaactttcaaggcaaatgatgacttagtacttaaa

SEQ ID NO: 56 - DNA, 50 bp, Homo sapiens
tacctgggcattcttgtttcattcaattccacctgcaatcaagtcctaca

SEQ ID NO: 57 - DNA, 60 bp, Homo sapiens
ccattaaacttacctgggcattcttgtttcattcaattccacctgcaatcaagtcctaca

SEQ ID NO: 58 - DNA, 70 bp, Homo sapiens
cacctgcaatcaagtcctacaagctaaaattagatgaactcaactttgacaaccatgagaccactgttat

SEQ ID NO: 59 - DNA, 50 bp, Homo sapiens
aatgcgtacgtttcctgagaagtgtctaaaaacaccaaaaagggatccgt

SEQ ID NO: 60 - DNA, 60 bp, Homo sapiens
acgtttcctgagaagtgtctaaaaacaccaaaaagggatccgtacattcaatgtttatgc

SEQ ID NO: 61 - DNA, 70 bp, Homo sapiens
caaatcaatgcgtacgtttcctgagaagtgtctaaaaacaccaaaaagggatccgtacattcaatgttta

SEQ ID NO: 62 - DNA, 50 bp, Homo sapiens
ctccgggagaggggacggtcaatcctgtgggtgaagacagagggaaacac

SEQ ID NO: 63 - DNA, 50 bp, Homo sapiens
ggctgggaaactgttggtggccagtgggtaataaagacctttcagtatcc

SEQ ID NO: 64 - DNA, 50 bp, Homo sapiens
tgctagaggggcttagagaactacaaggcctgcagaatttcccagagaag

SEQ ID NO: 65 - DNA, 50 bp, Homo sapiens
ctgactcaggatgacagacaggtggaactgccagtgtagagggaattcta

SEQ ID NO: 66 - DNA, 50 bp, Homo sapiens
gtaaaggctatacttgtcttgttcaccttgggatgacgccgcatgatatg

SEQ ID NO: 67 - DNA, 50 bp, Homo sapiens
caagcaggaagcacaaactcccccaagctgactcatcctaactaacagtc

SEQ ID NO: 68 - DNA, 50 bp, Homo sapiens
tcttcaacagaccccctctagaaatttttcagatgcttctgggagacacc

SEQ ID NO: 69 - DNA, 50 bp, Homo sapiens
gtcctccacgccatttccttttccttcaagcctagcccttctctcattat

SEQ ID NO: 70 - DNA, 50 bp, Homo sapiens
ggcccttcatgtacatccatggtgtgctggcttaaaatgtaattaatctt

SEQ ID NO: 71 - DNA, 50 bp, Homo sapiens
aagatgcccaaccctgtgatcagaacctccaaatactgccatgagaaact

SEQ ID NO: 72 - DNA, 50 bp, Homo sapiens
caggagtttgtgtgtcttttataaaaagtttgccctggatgtcatattgg

SEQ ID NO: 73 - DNA, 50 bp, Homo sapiens
ccctgagtgacagtcacgacagaacaaaaccacaagaccagaccacattt

SEQ ID NO: 74 - DNA, 50 bp, Homo sapiens
cctttacatccagataggttaccagtaacggaacatatccagtactcctg

SEQ ID NO: 75 - DNA, 50 bp, Homo sapiens
tgcatcgtaaaaccttcagaaggaaaggagaatgttttgtggaccacttt

SEQ ID NO: 76 - DNA, 50 bp, Homo sapiens
ggccactgaatgggtaggagcaaccactgactggtcttaagctgttcttg

SEQ ID NO: 77 - DNA, 50 bp, Homo sapiens
tgtagggtaaatgtgactggaatacacctttggaacggaattctttatca

SEQ ID NO: 78 - DNA, 50 bp, Homo sapiens
aggctggacatcggcccgctccccacaatgaaataaagttattttctcat

SEQ ID NO: 79 - DNA, 50 bp, Homo sapiens; identical to SEQ ID NO: 77

SEQ ID NO: 80 - DNA, 50 bp, Homo sapiens
gttgccatggtgatggtgtagccctcccactttgctgttccttactttac

SEQ ID NO: 81 - DNA, 50 bp, Homo sapiens
ccacccacccctcaattaaggcaacaatgaagttaatggataccctctgc

SEQ ID NO: 82 - DNA, 50 bp, Homo sapiens; identical to SEQ ID NO: 80

SEQ ID NO: 83 - DNA, 50 bp, Homo sapiens; identical to SEQ ID NO: 81

SEQ ID NO: 84 - DNA, 50 bp, Homo sapiens
gctcacctatttgggttaagcatgccaatttaaagagaccaagtgtatgt

SEQ ID NO: 85 - DNA, 50 bp, Homo sapiens
tccaccttttgtatttaattttaaagtcagtgtactgcaaggaagctgga

SEQ ID NO: 86 - DNA, 50 bp, Homo sapiens
ccctatcccgcaaaatgggcttcctgcctgggtttttctcttctcacatt

SEQ ID NO: 87 - DNA, 50 bp, Homo sapiens; identical to SEQ ID NO: 85

SEQ ID NO: 88 - DNA, 50 bp, Homo sapiens
agatcttcaagtgaacatctcttgccatcacctagctgcctgcacctgcc

SEQ ID NO: 89 - DNA, 50 bp, Homo sapiens
gctaattttaagcatgttcagtggcagctcccctccagtttcagtgtcac

SEQ ID NO: 90 - DNA, 50 bp, Homo sapiens
cctgtgatcaggctcccaagtctggttcccatgaggtgagatgcaacctg

SEQ ID NO: 91 - DNA, 50 bp, Homo sapiens
acatggtttgactcccgaacatcaccgacgtgtctcctgtttttctgggt

SEQ ID NO: 92 - DNA, 50 bp, Homo sapiens
tcagagctgaagaagcgagctggatggcaaggcctgtgcgacagataatg

SEQ ID NO: 93 - DNA, 50 bp, Homo sapiens
tcagccattttgggcatatgtatctttataatcagactggaaacgggact

SEQ ID NO: 94 - DNA, 50 bp, Homo sapiens
atcctggcaaccttacaattcctctcggcatttgtcacttccatctcagc

SEQ ID NO: 95 - DNA, 50 bp, Homo sapiens
agcttactacagtgaaagaatgggattggcaagtaacttctgacttactg

SEQ ID NO: 96 - DNA, 50 bp, Homo sapiens
attataacatcttcaacacagaacacactttgtggtcgaaaggctcagcc

SEQ ID NO: 97 - DNA, 50 bp, Homo sapiens
tgtcagagattgcctgtggctctaatatgcacctcaagattttaaggaga

SEQ ID NO: 98 - DNA, 50 bp, Homo sapiens
tgtctggcagggactgaatgacctgatgtcagatttagattcttcctggg

SEQ ID NO: 99 - DNA, 50 bp, Homo sapiens
gggaggaacactgcactcttaagcttccgccgtctcaacccctcacagga

SEQ ID NO: 100 - DNA, 50 bp, Homo sapiens
atgaagaagggtgtgaaggctgaacaatcatggatttttctgatcaattg

SEQ ID NO: 101 - DNA, 50 bp, Homo sapiens
gcctctgctccccagggagttgtgtctgtaatcggcctactattcagtgg

SEQ ID NO: 102 - DNA, 50 bp, Homo sapiens
ggatgctactgatgggaatgattaagggagctgctgtttaggtggtgctg

SEQ ID NO: 103 - DNA, 50 bp, Homo sapiens
tcaggaacaacatctactgcatggcccagctgctggacaactcagacacg

SEQ ID NO: 104 - DNA, 50 bp, Homo sapiens
cttacatcaggtactttgtcagcttcatcatccagttccagttccacgag

SEQ ID NO: 105 - DNA, 50 bp, Homo sapiens
catccaggagctgttcaagcgcatctccgagcagttcacggccatgttcc

SEQ ID NO: 106 - DNA, 50 bp, Homo sapiens
acctcccactttgtctgtacatactggcctctgtgattacatagatcagc

SEQ ID NO: 107 - DNA, 50 bp, Homo sapiens
gtctttgagaatatgatgtcagacattttcggatgggctgtttagatgtt

SEQ ID NO: 108 - DNA, 50 bp, Homo sapiens
ggtcacccaggaggatggcaaagagagtcgcatctcagtgcaggagagac

SEQ ID NO: 109 - DNA, 50 bp, Homo sapiens
agacccttatctggaggaggaagagaagcaggagagagaaagccacagcc

SEQ ID NO: 110 - DNA, 50 bp, Homo sapiens
ggctgtgtcctaaggcccatttgagaagctgaggctagttccaaaaacct

SEQ ID NO: 111 - DNA, 50 bp, Homo sapiens
gtgctcctgtaagtcaaatgtgtgctttgtactgctgttgttgaaattga

SEQ ID NO: 112 - DNA, 50 bp, Homo sapiens
cagagacataaagagaagatgccaaggccccctcctccacccaccgctaa

SEQ ID NO: 113 - DNA, 50 bp, Homo sapiens
atgggagtaataagagcagtggcagcagcatctctgaacatttctctgga

SEQ ID NO: 114 - DNA, 50 bp, Homo sapiens
ccactaatcctgatgaggctgacaaagttggggctgagaacacaatcacc

SEQ ID NO: 115 - DNA, 50 bp, Homo sapiens
tgttggggtttcctttaccttttctataagttgtaccaaaacatccactt

SEQ ID NO: 116 - DNA, 50 bp, Homo sapiens
cagagtaggcatctgggcaccaagaccttccctcaacagaggacactgag

SEQ ID NO: 117 - DNA, 50 bp, Homo sapiens
ctttgcctaaaccctatggcctcctgtgcatctgtactcaccctgtacca

SEQ ID NO: 118 - DNA, 50 bp, Homo sapiens; identical to SEQ ID NO: 76

SEQ ID NO: 119 - DNA, 50 bp, Homo sapiens
tgattctgcacttggggtctgtctgtacagttactcatgtcattgtaatg

SEQ ID NO: 120 - DNA, 50 bp, Homo sapiens
tgtgtaataggccttttcatgctttatgtgtagctttttacctgtaacct

SEQ ID NO: 121 - DNA, 50 bp, Homo sapiens
aagttatcatgtccatccgcaccaagctgcagaacaaggagcatgtgatt

SEQ ID NO: 122 - DNA, 50 bp, Homo sapiens; identical to SEQ ID NO: 121

SEQ ID NO: 123 - DNA, 50 bp, Homo sapiens
tggtggatgttaaaccaatattcctttcaactgctgcctgctagggaaaa

SEQ ID NO: 124 - DNA, 50 bp, Homo sapiens
tgaacttgctgaatgtaaggcaggctactatgcgttataatctaatcaca

SEQ ID NO: 125 - DNA, 50 bp, Homo sapiens
atttgaccagagcaaagctgaaaaatgaataactaaccccctttccctgc

SEQ ID NO: 126 - DNA, 60 bp, Homo sapiens
gcaattggagaactggatttgctgtttatgtctctgagaaatgcctgcatttgaccagag

SEQ ID NO: 127 - DNA, 70 bp, Homo sapiens
tttgaccagagcaaagctgaaaaatgaataactaaccccctttccctgctagaaataacaattagatgcc

SEQ ID NO: 128 - DNA, 50 bp, Homo sapiens
ccctttttgtcccccaacttgagatgtatgaaggcttttggtctccctgg

SEQ ID NO: 129 - DNA, 50 bp, Homo sapiens
attagaccagaccagtgtatttctaaagaaaatcctgacatgcacaccca

SEQ ID NO: 130 - DNA, 50 bp, Homo sapiens
gaccctactgctgatgataccagtgctgctgtaactgaagaaatgccacc

SEQ ID NO: 131 - DNA, 50 bp, Homo sapiens
acaggcaaagtgacaggggaaaaggaattagtctaagagtaaggggatga

SEQ ID NO: 132 - DNA, 50 bp, Homo sapiens
ctttcctcttgctgctggggcctaggtcttcttgctgctgcttccttttc

SEQ ID NO: 133 - DNA, 50 bp, Homo sapiens
agagtttttgttggtagactggagctgggatgttgaatcaacctcaggca

SEQ ID NO: 134 - DNA, 50 bp, Homo sapiens
tgcctgaggttgattcaacatcccagctccagtctaccaacaaaaactct

SEQ ID NO: 135 - DNA, 50 bp, Homo sapiens
ctgacgatcagcttggaacagccaaacagaattaacgcaactaataacct

SEQ ID NO: 136 - DNA, 50 bp, Homo sapiens
tccttttatgcattggaggaaaaacatgttggcttttctcttgacgtggg

SEQ ID NO: 137 - DNA, 50 bp, Homo sapiens
cccacgtcaagagaaaagccaacatgtttttcctccaatgcataaaagga

SEQ ID NO: 138 - DNA, 50 bp, Homo sapiens
ctcaggaaacccgacagaagaaacatgtaacacagaactcacgtccacta

SEQ ID NO: 139 - DNA, 50 bp, Homo sapiens
actcgagacgtaaattatggctgaatcatccgctaccttcacgccaatgg

SEQ ID NO: 140 - DNA, 50 bp, Homo sapiens
tgctgttttcattctgcatttgtgtagtttggtgctttgttccaagttaa

SEQ ID NO: 141 - DNA, 50 bp, Homo sapiens
aaaaatgacaaaagttatcaccaaaaccccctttcccatcttgcactgtt

SEQ ID NO: 142 - DNA, 50 bp, Homo sapiens
agcttttaatgctccaaatgctgacccatgcaatatttcctcatgtgatc

SEQ ID NO: 143 - DNA, 50 bp, Homo sapiens
aaaagaaatgcaggtttattatccagcactgagagagttaacaaggactg

SEQ ID NO: 144 - DNA, 50 bp, Homo sapiens
agagagacttctcattggctgtgaaggtagagcttttggggaaattcctg

SEQ ID NO: 145 - DNA, 50 bp, Homo sapiens
caggaatttccccaaaagctctaccttcacagccaatgagaagtctctct

SEQ ID NO: 146 - DNA, 50 bp, Homo sapiens; identical to SEQ ID NO: 144

SEQ ID NO: 147 - DNA, 50 bp, Homo sapiens
catctcagccctgcctttctctggagcattctgaaaacagatattctggc

SEQ ID NO: 148 - DNA, 50 bp, Homo sapiens
tcatgataacctgcagacctgatcaagcctctgtgcctcagtttctctct

SEQ ID NO: 149 - DNA, 50 bp, Homo sapiens
atgggggtaataagagcagtagcagcagcatctctgaacatttctctgga

SEQ ID NO: 150 - DNA, 50 bp, Homo sapiens
gaaattgcttttcctcttgaaccacagttctacccctgggatgttttgag

SEQ ID NO: 151 - DNA, 50 bp, Homo sapiens
aattcctcaggaagtaaaaccgaagaagatggcccagctccccaagaaag

SEQ ID NO: 152 - DNA, 50 bp, Homo sapiens
aacatccaaggagaaacagagacaggcccaagagatgaagagtgagaggg

SEQ ID NO: 153 - DNA, 50 bp, Homo sapiens
tcgtgtgaatcagactaagtgggatttcatttttacaactctgctctact

SEQ ID NO: 154 - DNA, 50 bp, Homo sapiens
gcatatacaagttggaagactaaagaggtgcaatgtgatctgagcctcca

SEQ ID NO: 155 - DNA, 50 bp, Homo sapiens
tgagtgtgtttgtgtgcatgaaagagaaagactgattacctcctgtgtgg

SEQ ID NO: 156 - DNA, 50 bp, Homo sapiens
agctgttcccaaattttctaacgagtggaccattatcactttaaagccct

SEQ ID NO: 157 - DNA, 50 bp, Homo sapiens
atcaacagaccaacatttttctcttcctcaagcaacactcctagggcctg

SEQ ID NO: 158 - DNA, 50 bp, Homo sapiens
tatgactgatgatcctccaacaacaaaaccacttactgctcgtaaattca

SEQ ID NO: 159 - DNA, 50 bp, Homo sapiens
aaaatactgatgttcctagtgaaagaggcagcttgaaactgagatgtgaa

SEQ ID NO: 160 - DNA, 50 bp, Homo sapiens
ggaagactttaaaccacctagttctcccactggggcatcggtctaaagct

SEQ ID NO: 161 - DNA, 50 bp, Homo sapiens
ccctgttccacaaacccatatgtatcctttcctcaacctcctcctttccc

SEQ ID NO: 162 - DNA, 50 bp, Homo sapiens
gtgtgtgagtgtgagtgtgagcgagagggtgagtgtggtcagagtaaagc

SEQ ID NO: 163 - DNA, 50 bp, Homo sapiens
tctggtcattcaaggatcccctcccaaggctatgcttttctataactttt

SEQ ID NO: 164 - DNA, 50 bp, Homo sapiens
ggcagctcaggaccactccaatgacccacctaacaagatgaatgaagtta

SEQ ID NO: 165 - DNA, 50 bp, Homo sapiens
tgttcttcatctaagccttctggttttatgggtcagagttccgactgcca

SEQ ID NO: 166 - DNA, 50 bp, Homo sapiens
gccttcatgcacctgtcctttctaacacgtcgccttcaactgtaatcaca

SEQ ID NO: 167 - DNA, 50 bp, Homo sapiens
ccctctcctctcttcctccctggaatcttgtaaaggtcctggcaaagatg

SEQ ID NO: 168 - DNA, 50 bp, Homo sapiens
ctgggctgggacgtgacctgtgctgagggctgtgagaatgtgaaacaaca

SEQ ID NO: 169 - DNA, 50 bp, Homo sapiens
gggatgaacgaaagccccctcttcaactcctctcactttttaaagcattg

SEQ ID NO: 170 - DNA, 50 bp, Homo sapiens
acaatgttgagttcagcatgtgtctgccatttcatttgtacgcttgttca

SEQ ID NO: 171 - DNA, 50 bp, Homo sapiens
tttcagtcccagaacctacagataccctgctacttgcttcacgtggatgc

SEQ ID NO: 172 - DNA, 50 bp, Homo sapiens
aattcagttagctccattcagaaccaaatgcagtccaagggaggttatgg

SEQ ID NO: 173 - DNA, 50 bp, Homo sapiens
cccatcttacagaagttgaggccaagggagaatggtaggcacagaagaaa

SEQ ID NO: 174 - DNA, 50 bp, Homo sapiens
tgtgttaagtgcaggagacattggtattctgggcaccttcctaatatgct

SEQ ID NO: 175 - DNA, 50 bp, Homo sapiens
tgtgttaagtgcaggagacattggtattctgggcagcttcctaatatgct

SEQ ID NO: 176 - DNA, 50 bp, Homo sapiens
agctgtgttggtagtgctgtgttgaattacggaataatgagttagaacta

SEQ ID NO: 177 - DNA, 50 bp, Homo sapiens; identical to SEQ ID NO: 115

SEQ ID NO: 178 - DNA, 60 bp, Homo sapiens
tgcatgttggggtttcctttaccttttctataagttgtaccaaaacatccacttaagttc

SEQ ID NO: 179 - DNA, 70 bp, Homo sapiens
tgttggggtttcctttaccttttctataagttgtaccaaaacatccacttaagttctttgatttgtacca

SEQ ID NO: 180 - DNA, 50 bp, Homo sapiens
tctacctgcagtctccattgtttccagagtgaacttgtaattatcttgtt

SEQ ID NO: 181 - DNA, 50 bp, Homo sapiens
gtgtgcgtgtgtgtgtgcctgtccagtgtatattgtgtcttagcttccat

SEQ ID NO: 182 - DNA, 50 bp, Homo sapiens
ctgaagggaagagagccttgaatagactgaagcgaagacggttctgcaag

SEQ ID NO: 183 - DNA, 50 bp, Homo sapiens
ttctctgcatctaggccatcatactgccaggctggttatgactcagaaga

SEQ ID NO: 184 - DNA, 50 bp, Homo sapiens
cttcctgtacctcctccccacagcttgcttttgttgtaccgtctttcaat

SEQ ID NO: 185 - DNA, 50 bp, Homo sapiens
aacctgcacaagcatgtaataaaagagcacacttaaaaacattctgacca

SEQ ID NO: 186 - DNA, 50 bp, Homo sapiens
tggtcagaatgtttttaagtgtgctcttttattacatgcttgtgcaggtt

SEQ ID NO: 187 - DNA, 50 bp, Homo sapiens
ccttctgaaggtgtatagatacagcttgtcttgaaatgtctttctccaca

SEQ ID NO: 188 - DNA, 50 bp, Homo sapiens
tgtggagaaagacatttcaagacaagctgtatctatacaccttcagaagg

SEQ ID NO: 189 - DNA, 50 bp, Homo sapiens
tgctaggtcacagaggatctgcttggtcttgataagctatgttgttgcac

SEQ ID NO: 190 - DNA, 50 bp, Homo sapiens
ctagaggaccattcatgcaatgactatttctaaagcacctgctacacagc

SEQ ID NO: 191 - DNA, 50 bp, Homo sapiens
gggagtttctgagggtctgctttgtttacctttcgtgcggtggattcttt

SEQ ID NO: 192 - DNA, 50 bp, Homo sapiens
tcggaggagtcggacgaggatatgggatttggtctctttgactaatcacc

SEQ ID NO: 193 - DNA, 50 bp, Homo sapiens
ttccttcctcggtggtgttaatcatttcgtttttaccctttaccttcgga

SEQ ID NO: 194 - DNA, 50 bp, Homo sapiens
gtctacatcaactattacgacatgaacgcggccaatgtgggctggaacaa

SEQ ID NO: 195 - DNA, 50 bp, Homo sapiens
cagaagggtcaaaaagctccagcccagaaagcacctgctccaaaggcatc

SEQ ID NO: 196 - DNA, 50 bp, Homo sapiens
gaccttcctgccaccagtcactgtccctcaaatgacccaaagaccaatat

SEQ ID NO: 197 - DNA, 50 bp, Homo sapiens
gagatggggagggctaccacagagttatccactttacaacggagacacag

SEQ ID NO: 198 - DNA, 50 bp, Homo sapiens
atgggtttggcttgaggctggtagcttctatgtaattcgcaatgattcca

SEQ ID NO: 199 - DNA, 50 bp, Homo sapiens
catccctccatgtactctgggtatcagcaactgtcctcatcagtctccat

SEQ ID NO: 200 - DNA, 50 bp, Homo sapiens
accttacaggagatcatcaaaactttgaacagcctcacagagcagaagac

SEQ ID NO: 201 - DNA, 50 bp, Homo sapiens
gagaagacagtggcgaccaagacgattttctgccttagagcaagggattc

SEQ ID NO: 202 - DNA, 50 bp, Homo sapiens
caggggatcagtgaaggaagagaaggccagcagatcagtgagagtgcaac

SEQ ID NO: 203 - DNA, 50 bp, Homo sapiens
cccattccctctctactcttgacagcaggattggatgttgtgtattgtgg

SEQ ID NO: 204 - DNA, 50 bp, Homo sapiens
acttaatatgtgggaaacccttttgcgtggtccttaggcttacaatgtgc

SEQ ID NO: 205 - DNA, 50 bp, Homo sapiens
aaaatacaagggctgttggtgagagcagacttgaggtgatgatagttggc

SEQ ID NO: 206 - DNA, 50 bp, Homo sapiens
ccagattttccccaaacttgcttctgttgagatttttccctcaccttgcc

SEQ ID NO: 207 - DNA, 50 bp, Homo sapiens
accttgggttgagtaatgctcgtctgtgtgttttagtttcatcacctgtt

SEQ ID NO: 208 - DNA, 50 bp, Homo sapiens
aaactcccctttcttgaggttgtctgagtcttgggtctatgccttgaaaa

SEQ ID NO: 209 - DNA, 50 bp, Homo sapiens
ctcagtgttggtgtggtgatgtttgttgcttttatgatttcatattgtgc

SEQ ID NO: 210 - DNA, 50 bp, Homo sapiens
ctgtatctttgacaattctgggtgcgagtgtgagagtgtgagcagggctt

SEQ ID NO: 211 - DNA, 50 bp, Homo sapiens
gataagtgtcctatggggatggtccactgtcactgtttctctgctgttgc

SEQ ID NO: 212 - DNA, 60 bp, Homo sapiens
tttagccaaaggataagtgtcctatggggatggtccactgtcactgtttctctgctgttg

SEQ ID NO: 213 - DNA, 70 bp, Homo sapiens
atttatattagtttagccaaaggataagtgtcctatggggatggtccactgtcactgtttctctgctgtt

SEQ ID NO: 214 - DNA, 50 bp, Homo sapiens
gaaggaagaagtggggtggaagaagtggggtgggacgacagtgaaatcta

SEQ ID NO: 215 - DNA, 50 bp, Homo sapiens
ccatcaatgaggtatcttctttagtggtggtatgtaatggaacttagcca

SEQ ID NO: 216 - DNA, 50 bp, Homo sapiens
aaagacgtgcactcaaccttctaccaggccactctcaggctcaccttaaa

SEQ ID NO: 217 - DNA, 50 bp, Homo sapiens
ccaagctgcttgtcctgggcctgcccctgtgtattcaccaccaataaatc

SEQ ID NO: 218 - DNA, 50 bp, Homo sapiens
cactggggacgagacaggtgctaaagttgaacgagctgatggatatgaac

SEQ ID NO: 219 - DNA, 50 bp, Homo sapiens
cgttgctgaagtggtaattgaggaaaacagttccccagattgttaagagt

SEQ ID NO: 220 - DNA, 50 bp, Homo sapiens
ctccccgtgagcactgcgtacaaacatccaaaagttcaacaacaccagaa

SEQ ID NO: 221 - DNA, 50 bp, Homo sapiens
agtgcctttcaggatctatttttggaggtttattacgtatgtctggttct

SEQ ID NO: 222 - DNA, 50 bp, Homo sapiens
agaacaaactaagccaggtatgcaaatatcgctgaatagaaacagatgga

SEQ ID NO: 223 - DNA, 50 bp, Homo sapiens; identical to SEQ ID NO: 222

SEQ ID NO: 224 - DNA, 50 bp, Homo sapiens
gcaattcctcaggctaagctgccggttcttaaatccatcctgctaagtta

SEQ ID NO: 225 - DNA, 50 bp, Homo sapiens
tcctggtggctctttgtggaggaaactaaacattcccttgatggtctcaa

SEQ ID NO: 226 - DNA, 50 bp, Homo sapiens
ctttgggttggagctgttccattgggtcctcttggtgtcgtttccctccc

SEQ ID NO: 227 - DNA, 50 bp, Homo sapiens
agaaaaagcttgggttaactcagtagttagatcaaagcaaatgtggactg

SEQ ID NO: 228 - DNA, 50 bp, Homo sapiens
acagatgtagcaacatgagaaacgcttatgttacaggttacatgagagca

SEQ ID NO: 229 - DNA, 50 bp, Homo sapiens
tgtttaatggtagttttacagtgtttctggcttagaacaaaggggcttaa

SEQ ID NO: 230 - DNA, 50 bp, Homo sapiens
tgccagcatatactgaagtcttttctgtcaccaaatttgtacctctaagt

SEQ ID NO: 231 - DNA, 50 bp, Homo sapiens
gctgcatatgagtaaagttaccccaaccacagtgaggaggaagatgttca

SEQ ID NO: 232 - DNA, 50 bp, Homo sapiens
aaacctccagtactttggttgacccttgtatgtcacagctctgctctatt

SEQ ID NO: 233 - DNA, 50 bp, Homo sapiens
acctgatcaatgacagagccttctgaggacattccaagacagtatacagt

SEQ ID NO: 234 - DNA, 50 bp, Homo sapiens
gcccttcccttcttggtttccaaaggcatttattgctgagttatatgttc

SEQ ID NO: 235 - DNA, 50 bp, Homo sapiens
ctgattgtagcagcctcgttagtgtcaccccctcctccctgatctgtcag

SEQ ID NO: 236 - DNA, 50 bp, Homo sapiens
accaaaaagaatagggaaaaacaagaatttcatgactctacctgtggtct

SEQ ID NO: 237 - DNA, 50 bp, Homo sapiens
gacttttccaaccctcatcaccaacgtctgtgccattttgtattttacta

SEQ ID NO: 238 - DNA, 50 bp, Homo sapiens
gctcgctaccagaaatcctaccgataagcccatcgtgactcaaaactcac

SEQ ID NO: 239 - DNA, 50 bp, Homo sapiens
acctgagtcccacaacaattgaaactgcaatgaagtctccttattctgct

SEQ ID NO: 240 - DNA, 50 bp, Homo sapiens
aattgatgaggatgctcctgggagggatgcgtgactatgtggtgttgcac

SEQ ID NO: 241 - DNA, 50 bp, Homo sapiens
tgaaatatgggaaagttgctgctattgattcagggtctgtcttggaggca

SEQ ID NO: 242 - DNA, 50 bp, Homo sapiens
caactgatagccacgctgaagaatggaaggaaaatttgcttggacctgca

SEQ ID NO: 243 - DNA, 50 bp, Homo sapiens
tgtgtaaatacataagcggcgtaagtttaaaggatgttggtgttccacgt

SEQ ID NO: 244 - DNA, 50 bp, Homo sapiens
aaccctcctccaatggaaattcccgtgttgcttcaaactgagacagatgg

SEQ ID NO: 245 - DNA, 60 bp, Homo sapiens
cctccaatggaaattcccgtgttgcttcaaactgagacagatgggacttaacaggcaatg

SEQ ID NO: 246 - DNA, 70 bp, Homo sapiens
ccaaccctcctccaatggaaattcccgtgttgcttcaaactgagacagatgggacttaacaggcaatggg

SEQ ID NO: 247 - DNA, 50 bp, Homo sapiens
aatcatcatctggatttaggaattgctcttgtcatacccccaagtttcta

SEQ ID NO: 248 - DNA, 50 bp, Homo sapiens
gcaagacatagaatagtgttggaaaatgtgcaatatgtgatgtggcaaat

SEQ ID NO: 249 - DNA, 50 bp, Homo sapiens
tctccatcttggtataaatacacttccacagtcagcacggggatcacaga

SEQ ID NO: 250 - DNA, 50 bp, Homo sapiens
tctccttactgggatagtcaggtaaacagttggtcaagactttgtaaaga

SEQ ID NO: 251 - DNA, 50 bp, Homo sapiens
acccatgatgagctcctcttcctggcttcttactgaaaggttaccctgta

SEQ ID NO: 252 - DNA, 50 bp, Homo sapiens
tgacatcatattctttcagagaagtgtcccaggacatgataataagatgc

SEQ ID NO: 253 - DNA, 50 bp, Homo sapiens
atcagaaaccgaagattaactacacagctccagaagactcagacctcaaa

SEQ ID NO: 254 - DNA, 50 bp, Homo sapiens
caggttcttaagggattctccgttttggttccattttgtacacgtttgga

SEQ ID NO: 255 - DNA, 50 bp, Homo sapiens
ctagaagatccacatcctctacaggtcggggaccaaaggctgattcttgg

SEQ ID NO: 256 - DNA, 50 bp, Homo sapiens
cttcttttgccatgtttccattctgccatcttgaattgtcttgtcagcca

SEQ ID NO: 257 - DNA, 50 bp, Homo sapiens
catggagacttgaggagggcttgaggttggtgaggttaggtgcgtgtttc

SEQ ID NO: 258 - DNA, 50 bp, Homo sapiens
cccatgtaagcaccccttcatttggcattccccacttgagaattaccctt

SEQ ID NO: 259 - DNA, 50 bp, Homo sapiens
cttgggccagactgtcagggttcaaggagggcatcaggagcagacggaga

SEQ ID NO: 260 - DNA, 50 bp, Homo sapiens
cctccgctcaactagcagatacagggatgaggcagacctgactctcttaa

SEQ ID NO: 261 - DNA, 50 bp, Homo sapiens
cagcggaacccttagcacccacatggaccaacagttcttccaaacttgac

SEQ ID NO: 262 - DNA, 50 bp, Homo sapiens
atgcctggtgcttccaaatattgttgacaactgtgactgtacccaaatgg

SEQ ID NO: 263 - DNA, 50 bp, Homo sapiens
cctctctccaaacccgttttccaacatttgttaatagttacgtctctcct

SEQ ID NO: 264 - DNA, 50 bp, Homo sapiens
tcatttgttgtgtgactgagtaaagaatttttggatcaagcggaaagagt

SEQ ID NO: 265 - DNA, 50 bp, Homo sapiens
tgaggatgtagagagaacaggtgggctgtattcacgccattggttggaag

SEQ ID NO: 266 - DNA, 50 bp, Homo sapiens
gaaattaaatgggttccaggtcttaaagaaagtgcagaagagatggtcaa

SEQ ID NO: 267 - DNA, 50 bp, Homo sapiens
aaccactatcatctacggcacaaacttgcaaaagctgtccacaccatttt

SEQ ID NO: 268 - DNA, 50 bp, Homo sapiens
cccgttttggggacgtgaacgttttaataatttttgctgaattctttaca

SEQ ID NO: 269 - DNA, 50 bp, Homo sapiens
tcagttttcaggagtgggttgatttcagcacctacagtgtacagtcttgt

SEQ ID NO: 270 - DNA, 50 bp, Homo sapiens
agcctatctgcttaagagactctggagtttcttatgtgccctggtggaca

SEQ ID NO: 271 - DNA, 50 bp, Homo sapiens
gagtagaaggacaacagggcagcaacttggagggagttctctggggatgg

SEQ ID NO: 272 - DNA, 50 bp, Homo sapiens
gttctggaactaaagggatctgaaacaacattcatgtgtgaatatgcaga

SEQ ID NO: 273 - DNA, 60 bp, Homo sapiens
tggaactaaagggatctgaaacaacattcatgtgtgaatatgcagatgagacagcaacca

SEQ ID NO: 274 - DNA, 70 bp, Homo sapiens
cagggacttaatcagcaatatcaacgtaatagttctggaactaaagggatctgaaacaacattcatgtgt

SEQ ID NO: 275 - DNA, 50 bp, Homo sapiens
acccattccatttatctttctacagggctgacattgtggcacattcttag

SEQ ID NO: 276 - DNA, 50 bp, Homo sapiens
tgaacctccaacagggaaggctctgtccagaaaggattgaatgtgaaacg

SEQ ID NO: 277 - DNA, 50 bp, Homo sapiens
tgaaggagatgatgagaatcttattccagggaccaacattaacacaacca

SEQ ID NO: 278 - DNA, 50 bp, Homo sapiens
ctctctggaggtactgagacagggtgctgatgggaaggaggggagccttt

SEQ ID NO: 279 - DNA, 50 bp, Homo sapiens
ctcttcggcaaatgtagcatgggcacctcagattgttgttgttaatgggc

SEQ ID NO: 280 - DNA, 50 bp, Homo sapiens
ttccagaaagaaaagatgagagggatgagaggcaagatatgaagatgaaa

SEQ ID NO: 281 - DNA, 50 bp, Homo sapiens
ggccagcctggacccaatcatgaggaagatgcagactcttatgagaacat

SEQ ID NO: 282 - DNA, 50 bp, Homo sapiens
aatgtttgcccagaataaagaaaataagctttgcacacactctcaattct

SEQ ID NO: 283 - DNA, 50 bp, Homo sapiens
gggaaagaaataccaaccctgcaataagtgtactaaactctacgctctgg

SEQ ID NO: 284 - DNA, 50 bp, Homo sapiens
caccagcgccttggctttgtgttagcatttcctcctgaagtgttctgttg

SEQ ID NO: 285 - DNA, 50 bp, Homo sapiens
acatcgtgattctccagctcaacgggtcggccaccatcaacgccaacgtg

SEQ ID NO: 286 - DNA, 50 bp, Homo sapiens
agctacgtatccatcgtgatggcatctacatggtacacatccaggtgacg

SEQ ID NO: 287 - DNA, 50 bp, Homo sapiens
ccacactgaatctcccctcctcacagttgccatgtagaccccttgaagag

SEQ ID NO: 288 - DNA, 60 bp, Homo sapiens
cagtcccccaccacactgaatctcccctcctcacagttgccatgtagaccccttgaagag

SEQ ID NO: 289 - DNA, 70 bp, Homo sapiens
ccatgtagaccccttgaagaggggaggggcctagggagccgcaccttgtcatgtaccatcaataaagtac

SEQ ID NO: 290 - DNA, 50 bp, Homo sapiens
ctcttcaaggggtctacatggcaactgtgaggaggggagattcagtgtgg

SEQ ID NO: 291 - DNA, 60 bp, Homo sapiens
ctcttcaaggggtctacatggcaactgtgaggaggggagattcagtgtggtgggggactg

SEQ ID NO: 292 - DNA, 70 bp, Homo sapiens
gtactttattgatggtacatgacaaggtgcggctccctaggcccctcccctcttcaaggggtctacatgg

SEQ ID NO: 293 - DNA, 50 bp, Homo sapiens
tttccttgttccctcccatgcctagctggattgcagagttaagtttatga

SEQ ID NO: 294 - DNA, 60 bp, Homo sapiens
tttccttgttccctcccatgcctagctggattgcagagttaagtttatgattatgaaata

SEQ ID NO: 295 - DNA, 70 bp, Homo sapiens
gttccatgttttccttgttccctcccatgcctagctggattgcagagttaagtttatgattatgaaataa

SEQ ID NO: 296 - DNA, 50 bp, Homo sapiens
tcataaacttaactctgcaatccagctaggcatgggagggaacaaggaaa

SEQ ID NO: 297 - DNA, 60 bp, Homo sapiens
tatttcataatcataaacttaactctgcaatccagctaggcatgggagggaacaaggaaa

SEQ ID NO: 298 - DNA, 70 bp, Homo sapiens
ttatttcataatcataaacttaactctgcaatccagctaggcatgggagggaacaaggaaaacatggaac

SEQ ID NO: 299 - DNA, 50 bp, Homo sapiens
gtcatccacctggccctcaaggagagaggcgggaggaagaagtagacaag

SEQ ID NO: 300 - DNA, 50 bp, Homo sapiens
tgactgaggaggagaagaatatcaaatggggttgagtgtgcagatctctg

SEQ ID NO: 301 - DNA, 50 bp, Homo sapiens
tggttttccaaaatgcacactgcgggttattgatttgttctttacaacta

SEQ ID NO: 302 - DNA, 50 bp, Homo sapiens
actgtcagcatgttgttgttgaagtgtggagttgtaactctgcgtggact

SEQ ID NO: 303 - DNA, 50 bp, Homo sapiens
tgagtcacatcctgggatccagtgtataaatccaatatcatgtcttgtgc

SEQ ID NO: 304 - DNA, 50 bp, Homo sapiens
gttctgctactgcgaattgatgacatcgtttcaggccacaaaaagaaagg

SEQ ID NO: 305 - DNA, 50 bp, Homo sapiens
acattcccttggatgtagtctgaggccccttaactcatctgttatcctgc

SEQ ID NO: 306 - DNA, 50 bp, Homo sapiens
actggcttccatcagtggtaactgctttggtctcttctttcatctgggga

SEQ ID NO: 307 - DNA, 50 bp, Arabidopsis thaliana
ccattggagaacttggcaactcacttggcggatccatggcacaacaacat

SEQ ID NO: 308 - DNA, 50 bp, Arabidopsis thaliana
ttttctcctttgtgtaattgtggattggatcttgtcctcttttgttccct

SEQ ID NO: 309 - DNA, 50 bp, Arabidopsis thaliana
tattctttcgtgtcagggcttgaaccaagtatccccgcttcttctacccc

SEQ ID NO: 310 - DNA, 50 bp, Arabidopsis thaliana
catcaagtgaagtggggaataacgacatcatttgcctgaagagtatggtt

SEQ ID NO: 311 - DNA, 50 bp, Arabidopsis thaliana
aatgagggcattggtttgctagttgctaattgatcagtgatgtattgtca

SEQ ID NO: 312 - DNA, 50 bp, Arabidopsis thaliana
tggaatcaacaagatggcttctttccccaccaaaactaagtgatcatcag

SEQ ID NO: 313 - DNA, 50 bp, Arabidopsis thaliana
tggaccgtaatgaatgaatgtacacgccataaacgccctttgttcaagca

SEQ ID NO: 314 - DNA, 50 bp, Arabidopsis thaliana
cctcactcttgtacccacggtagattcatgtaaaataccacttatgacgc

SEQ ID NO: 315 - DNA, 50 bp, Arabidopsis thaliana
ggttagcgaccttgttgttgttgttgtgttcttacatcttcttcttgaac

SEQ ID NO: 316 - DNA, 50 bp, Arabidopsis thaliana
ggcgaaaaggacggtcttgcttgtttgtaatttgtgtggagataaaaaga

SEQ ID NO: 317 - DNA, 50 bp, Homo sapiens; identical to SEQ ID NO: 128

SEQ ID NO: 318 - DNA, 50 bp, Homo sapiens
tgaaatatcagactagtgacaagctcctggtcttgagatgtcttctcgtt

SEQ ID NO: 319 - DNA, 60 bp, Homo sapiens
ggttgagttacttcctatcaagccagtaccgtgctaacaggctcaatattcctgaatgaa

SEQ ID NO: 320 - DNA, 70 bp, Homo sapiens
gttgagttacttcctatcaagccagtaccgtgctaacaggctcaatattcctgaatgaaatatcagacta

SEQ ID NO: 321 - DNA, 50 bp, Homo sapiens
aacgagaagacatctcaagaccaggagcttgtcactagtctgatatttca

SEQ ID NO: 322 - DNA, 60 bp, Homo sapiens
ttcattcaggaatattgagcctgttagcacggtactggcttgataggaagtaactcaacc

SEQ ID NO: 323 - DNA, 70 bp, Homo sapiens
tagtctgatatttcattcaggaatattgagcctgttagcacggtactggcttgataggaagtaactcaac

SEQ ID NO: 324 - DNA, 50 bp, Homo sapiens
tttcaagacagaaagtgacgcagagaacctccccggcccagtctcgacgc

SEQ ID NO: 325 - DNA, 50 bp, Homo sapiens
gcgtcgagactgggccggggaggttctctgcgtcactttctgtcttgaaa

SEQ ID NO: 326 - DNA, 50 bp, Homo sapiens
cctagacacctgcatcagtcaaggtcatggatattgggaagacagacagc

SEQ ID NO: 327 - DNA, 50 bp, Homo sapiens
gctgtctgtcttcccaatatccatgaccttgactgatgcaggtgtctagg

SEQ ID NO: 328 - DNA, 50 bp, Homo sapiens
aaataagaagaggaaagagagaggcctgccctaacccactgttgtgctga

SEQ ID NO: 329 - DNA, 50 bp, Homo sapiens
tcagcacaacagtgggttagggcaggcctctctctttcctcttcttattt

SEQ ID NO: 330 - DNA, 50 bp, Homo sapiens
ctcatgcctgcagtgctgctcatgttgcccccttggaattacttgttcaa

SEQ ID NO: 331 - DNA, 50 bp, Homo sapiens
ttgaacaagtaattccaagggggcaacatgagcagcactgcaggcatgag

SEQ ID NO: 332 - DNA, 50 bp, Homo sapiens
ccaatttctataattattgaacagcttttcgtggggccagcacaaagtct

SEQ ID NO: 333 - DNA, 50 bp, Homo sapiens
agactttgtgctggccccacgaaaagctgttcaataattatagaaattgg

SEQ ID NO: 334 - DNA, 50 bp, Homo sapiens
tggctacaaatagagtagagaacagactccagtcctcaaagactttcagt

SEQ ID NO: 335 - DNA, 50 bp, Homo sapiens
actgaaagtctttgaggactggagtctgttctctactctatttgtagcca

SEQ ID NO: 336 - DNA, 50 bp, Homo sapiens
agttaagatggaagaatatagagaccttctgaagagcactgtagcttgga

SEQ ID NO: 337 - DNA, 50 bp, Homo sapiens
tccaagctacagtgctcttcagaaggtctctatattcttccatcttaact

SEQ ID NO: 338 - DNA, 50 bp, Homo sapiens
cactcctatggcatgtggaagcaggtctgagcagtgtgcatagaagaaaa

SEQ ID NO: 339 - DNA, 50 bp, Homo sapiens
ttttcttctatgcacactgctcagacctgcttccacatgccataggagtg

SEQ ID NO: 340 - DNA, 50 bp, Homo sapiens
gctctccgttgacaatggccaaagaatagaagctctagaccttccttatt

SEQ ID NO: 341 - DNA, 50 bp, Homo sapiens
aataaggaaggtctagagcttctattctttggccattgtcaacggagagc

SEQ ID NO: 342 - DNA, 50 bp, Homo sapiens
ggcaaaacgcacctggcacaacagaacgaataatacagaagctggatgac

SEQ ID NO: 343 - DNA, 50 bp, Homo sapiens
gtcatccagcttctgtattattcgttctgttgtgccaggtgcgttttgcc

SEQ ID NO: 344 - DNA, 50 bp, Homo sapiens
tagccatttcttcctgattgtgcctagtatatcccagacagtttgtttct

SEQ ID NO: 345 - DNA, 50 bp, Homo sapiens
agaaacaaactgtctgggatatactaggcacaatcaggaagaaatggcta

SEQ ID NO: 346 - DNA, 50 bp, Homo sapiens
ggttggaatggtgatcgggatgcagtgagatactcttgtgagagggcaaa

SEQ ID NO: 347 - DNA, 50 bp, Homo sapiens
tttgccctctcacaagagtatctcactgcatcccgatcaccattccaacc

SEQ ID NO: 348 - DNA, 50 bp, Homo sapiens
gccatgagattcaacagtcaacatcagtctgataagctacccgacaaagt

SEQ ID NO: 349 - DNA, 50 bp, Homo sapiens
actttgtcgggtagcttatcagactgatgttgactgttgaatctcatggc

SEQ ID NO: 350 - DNA, 50 bp, Homo sapiens
aagaggacaagtttgagaggcaacacttaaacactagggctactgtggca

SEQ ID NO: 351 - DNA, 50 bp, Homo sapiens
tgccacagtagccctagtgtttaagtgttgcctctcaaacttgtcctctt

SEQ ID NO: 352 - DNA, 50 bp, Homo sapiens
atttgctttaaattgagtttccttgccattgcacactcctatctttctga

SEQ ID NO: 353 - DNA, 50 bp, Homo sapiens
tcagaaagataggagtgtgcaatggcaaggaaactcaatttaaagcaaat

SEQ ID NO: 354 - DNA, 50 bp, Homo sapiens
aaaagtcactaccaggctggcagggaatggggcaatctattcatactgat

SEQ ID NO: 355 - DNA, 50 bp, Homo sapiens
atcagtatgaatagattgccccattccctgccagcctggtagtgactttt

SEQ ID NO: 356 - DNA, 50 bp, Homo sapiens
atattgatttggatacggtgaataagctggacaagatgttgaggagaggg

SEQ ID NO: 357 - DNA, 50 bp, Homo sapiens
ccctctcctcaacatcttgtccagcttattcaccgtatccaaatcaatat

SEQ ID NO: 358 - DNA, 50 bp, Homo sapiens
aatgtgcaaggtgaaatgcttttggataaacgtaagcctattttctgacg

SEQ ID NO: 359 - DNA, 50 bp, Homo sapiens
cgtcagaaaataggcttacgtttatccaaaagcatttcaccttgcacatt

SEQ ID NO: 360 - DNA, 50 bp, Homo sapiens
ttcatctctaaggcacacttgctacccctctttgctgaccccagattgtg

SEQ ID NO: 361 - DNA, 50 bp, Homo sapiens
cacaatctggggtcagcaaagaggggtagcaagtgtgccttagagatgaa

SEQ ID NO: 362 - DNA, 50 bp, Homo sapiens
ttctggcaagctcttgtcatggtgttcgacacttccttctgtcttcttgg

SEQ ID NO: 363 - DNA, 50 bp, Homo sapiens
ccaagaagacagaaggaagtgtcgaacaccatgacaagagcttgccagaa

SEQ ID NO: 364 - DNA, 50 bp, Homo sapiens
ggtcaatgtagccaattatttgtttcaacagttgcagaacagatatttca

SEQ ID NO: 365 - DNA, 50 bp, Homo sapiens
tgaaatatctgttctgcaactgttgaaacaaataattggctacattgacc

SEQ ID NO: 366 - DNA, 50 bp, Homo sapiens
tgaaaagacagctaatttggtccaacaaacatgactgggtctagggcacc

SEQ ID NO: 367 - DNA, 50 bp, Homo sapiens
ggtgccctagacccagtcatgtttgttggaccaaattagctgtcttttca

SEQ ID NO: 368 - DNA, 50 bp, Homo sapiens
tggatcattgcccaaagttgcacgcactgactccttacctgtgaggaatg

SEQ ID NO: 369 - DNA, 50 bp, Homo sapiens
cattcctcacaggtaaggagtcagtgcgtgcaactttgggcaatgatcca

SEQ ID NO: 370 - DNA, 50 bp, Homo sapiens
ttaaaacattaaaagattgactccactttgtgccaagctctgcgggtagg

SEQ ID NO: 371 - DNA, 50 bp, Homo sapiens
cctacccgcagagcttggcacaaagtggagtcaatcttttaatgttttaa

SEQ ID NO: 372 - DNA, 50 bp, Homo sapiens
tgaatttggagtccctggcacataaatctaccttcaaatcagaggtcctt

SEQ ID NO: 373 - DNA, 50 bp, Homo sapiens
aaggacctctgatttgaaggtagatttatgtgccagggactccaaattca

SEQ ID NO: 374 - DNA, 50 bp, Homo sapiens
tgggtcagagacgaaaagggctattattaggtcaaacattacagaaatca

SEQ ID NO: 375 - DNA, 50 bp, Homo sapiens
tgatttctgtaatgtttgacctaataatagcccttttcgtctctgaccca

SEQ ID NO: 376 - DNA, 50 bp, Homo sapiens
ctgatttaacaggtggttctgcgggcgtccaggtcaacatctttttgtcc

SEQ ID NO: 377 - DNA, 50 bp, Homo sapiens
ggacaaaaagatgttgacctggacgcccgcagaaccacctgttaaatcag

SEQ ID NO: 378 - DNA, 50 bp, Homo sapiens
gtcactttagcgagcgggaaaacaatggcggaaagggaaaacctggaaag

SEQ ID NO: 379 - DNA, 50 bp, Homo sapiens
ctttccaggttttccctttccgccattgttttcccgctcgctaaagtgac

SEQ ID NO: 380 - DNA, 50 bp, Homo sapiens
taattaatagagctcacttaagattgcccatcaagaaacaggagggtggt

SEQ ID NO: 381 - DNA, 50 bp, Homo sapiens
accaccctcctgtttcttgatgggcaatcttaagtgagctctattaatta

SEQ ID NO: 382 - DNA, 50 bp, Homo sapiens
agtcctgctgaatcattggtttatagaagactatctggagggcctgatag

SEQ ID NO: 383 - DNA, 50 bp, Homo sapiens
ctatcaggccctccagatagtcttctataaaccaatgattcagcaggact

SEQ ID NO: 384 - DNA, 50 bp, Homo sapiens
atgtgattccatgataatcaaatagtgaatacattataaagtcagcaact

SEQ ID NO: 385 - DNA, 50 bp, Homo sapiens
atatatgggggctgggcctcgggactctcgctctaataaaggactgtagg

SEQ ID NO: 386 - DNA, 50 bp, Homo sapiens
ttttgacccagatgatggttcctttacagaacaataaaatggctgaacat

SEQ ID NO: 387 - DNA, 50 bp, Homo sapiens
tgagcactggaaacagtttcatggagtttaagttgagtgaacatcggcca

SEQ ID NO: 388 - DNA, 50 bp, Homo sapiens
atgcatttagtttttggcaccgtagtttaagggtgggattgccagttttt

SEQ ID NO: 389 - DNA, 50 bp, Homo sapiens
ggttgtgtctctggtttccccttttccccgtggttttaatttttaagaac

SEQ ID NO: 390 - DNA, 50 bp, Homo sapiens
ggaggacacccctgtgtgttgctgctgccttccgtgctgtctactgtatc

SEQ ID NO: 391 - DNA, 50 bp, Homo sapiens
gcatcagagagaatatggaaggacatcgaccctaacttcatccagtgagg

SEQ ID NO: 392 - DNA, 50 bp, Homo sapiens
accatagcagacagggtcagatggaatattagcggtttaggtgaagaacc

SEQ ID NO: 393 - DNA, 50 bp, Homo sapiens
agacagaagacaaggccaaatgggtgtctctggaatgatagacttagaaa

SEQ ID NO: 394 - DNA, 50 bp, Homo sapiens
atccacattcttacctttggtagtcaggtttggctactttgcagctcgcc

SEQ ID NO: 395 - DNA, 50 bp, Homo sapiens
atagcagtggattaccaacaccttgacttcttgtacagtgctaacatctt

SEQ ID NO: 396 - DNA, 50 bp, Homo sapiens
tagtaaaagtgaaagagaaagggtttttcctgccacaggatataactttt

SEQ ID NO: 397 - DNA, 50 bp, Homo sapiens
aaagcggtcgtttccccacaaggtgtccaactttgcggtactcacactta

SEQ ID NO: 398 - DNA, 50 bp, Homo sapiens
ctaggcccgcccaccccaaccttctggtggggagaaataaacggtttaga

SEQ ID NO: 399 - DNA, 50 bp, Homo sapiens
tgcactaaacagttgccccaaaagacatatcttgttttaaggcccagacc

SEQ ID NO: 400 - DNA, 50 bp, Homo sapiens
ttggatgaagctgaaaagacactaagaccttctgtgcctcagatccctga

SEQ ID NO: 401 - DNA, 50 bp, Homo sapiens
gtgtggcctaaggaacacctcttgtggggagtaagagccagcccttctcc

SEQ ID NO: 402 - DNA, 50 bp, Homo sapiens
aaggatgaaggactgatggagggcagaggaactggaggcagcaggcacaa

SEQ ID NO: 403 - DNA, 50 bp, Homo sapiens
agatgtctgtataaacaacctttgggtagcaggtggtcagttaggcagga

SEQ ID NO: 404 - DNA, 50 bp, Homo sapiens
tgcttgtcttttaaacaccttcacagatatcatttgcaccttgccaaagg

SEQ ID NO: 405 - DNA, 50 bp, Homo sapiens
gggtaggcagcttgcacccagttctcctttatctcaacttattttcctgg

SEQ ID NO: 406 - DNA, 50 bp, Homo sapiens
ccggtgtccctgagtgagggcaaagttgtaataacacttgttctctcctt

SEQ ID NO: 407 - DNA, 50 bp, Homo sapiens
acggcgttctgaaatttagcacactgggaagtccacatggttcatctgaa

SEQ ID NO: 408 - DNA, 50 bp, Homo sapiens
aatgagatcacagatggtgacactgagcggaaggatgcagtacctcggag

SEQ ID NO: 409 - DNA, 50 bp, Homo sapiens
tccttgcaaaacatttggctagtggtgttcagagaaataccaaaacgtgt

SEQ ID NO: 410 - DNA, 50 bp, Homo sapiens
ggcaaaggggaaggatgatgccatgtagatcctgtttgacatttttatgg

SEQ ID NO: 411 - DNA, 50 bp, Homo sapiens
actgttaaccaaattttgagcaaggagtctcaaaggtaattctgaaccag

SEQ ID NO: 412 - DNA, 50 bp, Homo sapiens
actagcagattgaatcgatattcattaagttaggaatggttggtggtcct

SEQ ID NO: 413 - DNA, 50 bp, Homo sapiens
aattgtgctttgtatcagtcagtgctggagaaatcttgaatagcttatgt

SEQ ID NO: 414 - DNA, 50 bp, Homo sapiens
aggaaaccaagccctcacaggaaagaaagcctgaatcaagaaaacaaagt

SEQ ID NO: 415 - DNA, 50 bp, Homo sapiens
actgagcaggacaactgacctgtctccttcacatagtccatatcaccaca

SEQ ID NO: 416 - DNA, 50 bp, Homo sapiens
gcgtaaaacgccagggccatcttcttacttaagccacatcctgaaccagg

SEQ ID NO: 417 - DNA, 50 bp, Homo sapiens
agcgacaagaaggaatctggtgaattttagtcatcccagctttttagtct

SEQ ID NO: 418 - DNA, 50 bp, Homo sapiens
gctggggctgagagagggtctgggttatctccttctgatcttcaaaacaa

SEQ ID NO: 419 - DNA, 50 bp, Homo sapiens
tcatggacacaaactttggagtataagcgacatcccttaagcaacaggct

SEQ ID NO: 420 - DNA, 50 bp, Homo sapiens
attcaagtcagggcctctctgcccttttccctccagaaacaaaaccaaga

SEQ ID NO: 421 - DNA, 50 bp, Homo sapiens
tgtttgtaccactagcattcttatgtctgtacttgaacgtgtagttagca

SEQ ID NO: 422 - DNA, 50 bp, Homo sapiens
aatatagctccactaaaggaccatagggaagagccagccttgccttttct

SEQ ID NO: 423 - DNA, 50 bp, Homo sapiens
gacagtccattaagttgatttccagtggtgaagggtcagacacgcctccc

SEQ ID NO: 424 - DNA, 50 bp, Homo sapiens
cctgggttgccttgtaatgaaaagggagatcgagccattgtaccacctta

SEQ ID NO: 425 - DNA, 50 bp, Homo sapiens
gttcactgtttaacagccagaagccagagcctgcgtactagaagtggatg

SEQ ID NO: 426 - DNA, 50 bp, Homo sapiens
ttgtcaagtggatctgccccaaagtttgctttgaggaaacgggcctccct

SEQ ID NO: 427 - DNA, 50 bp, Homo sapiens
cttgtatggaaaacagatgctgacagaattgtagactaccatgccacaca

SEQ ID NO: 428 - DNA, 50 bp, Homo sapiens
aaatctaagacacccaaacccctctttgtccctaagtagccctagcctgg

SEQ ID NO: 429 - DNA, 50 bp, Homo sapiens
agctgtttaattgaattggaatcgttccacttggaacccaagtttggaaa

SEQ ID NO: 430 - DNA, 50 bp, Homo sapiens
tttttctacgttatctcatctccttgttttcagtgtgcttcaataatgca

SEQ ID NO: 431 - DNA, 50 bp, Homo sapiens
ctcccatctgcacacctggatcaaggtagcctctctgcacaagggcaggt

SEQ ID NO: 432 - DNA, 50 bp, Homo sapiens
tgtttttgcttcctcagaaactttttattgcatctgccatccttcattgg

SEQ ID NO: 433 - DNA, 50 bp, Homo sapiens
acagccaactggaaagatataaaagtttgggtctgtctcctctccttcag

SEQ ID NO: 434 - DNA, 50 bp, Homo sapiens
actcctgctttagagagaagccaccatgaaaagtcctcatcatcagggga

SEQ ID NO: 435 - DNA, 50 bp, Homo sapiens
tccgtactgtatgtgatatagtgccattttcagtaactgctgtacacaca

SEQ ID NO: 436 - DNA, 50 bp, Homo sapiens
acttgccattacttttccttcccactctctccaacatcacattcacttta

SEQ ID NO: 437 - DNA, 50 bp, Homo sapiens
gtgagtgtgagcgagagggtgagtgtggtcagagtaaagctgctccaccc

SEQ ID NO: 438 - DNA, 50 bp, Homo sapiens
taatatgctggctttgcagcagaatgaaaaggatgagttggtgtagcctt

SEQ ID NO: 439 - DNA, 50 bp, Homo sapiens
ttccttccctggaggaactctttggttgcagggctaaacttagaggctgc

SEQ ID NO: 440 - DNA, 50 bp, Homo sapiens
tctgacggttgggagtggtggaaattggaaggataccaggaggtatttgg

SEQ ID NO: 441 - DNA, 50 bp, Homo sapiens
tgattacaaaaggcgtattctttcatggtttctgcaatgagaggaagtgt

SEQ ID NO: 442 - DNA, 50 bp, Homo sapiens
tcatgcattggattgctcagaataaagtgtctgttagacttcgttttggt

SEQ ID NO: 443 - DNA, 50 bp, Homo sapiens
tgacgttaacaccaggaatctccatgtttattatttttcgtggaaactcc

SEQ ID NO: 444 - DNA, 50 bp, Homo sapiens
ttgcaaagactcacgtttttgttgttttctcatcattccattgtgatact

SEQ ID NO: 445 - DNA, 50 bp, Homo sapiens
agctgtacatataacccttttctcctaaagaggagtcagtcagtgctcct

SEQ ID NO: 446 - DNA, 50 bp, Homo sapiens
agttcaggagatctctaagtgtagctgtaaattttggggttaatttggct

SEQ ID NO: 447 - DNA, 50 bp, Homo sapiens
tgtttggttgaggggtgcttttagttgtgtggcatttgtattcattgatc

SEQ ID NO: 448 - DNA, 50 bp, Homo sapiens
tcagcctgagtgagttcagcctgtaaaaaggatgttaagctgtgggtaaa

SEQ ID NO: 449 - DNA, 50 bp, Homo sapiens
aggggaaaagaggggagaaaaacaggagtgatgtcatttctttttcatgt

SEQ ID NO: 450 - DNA, 50 bp, Homo sapiens
actttctgcttgtagttgcttaaaattatgtattttgtcttgggctgcaa

SEQ ID NO: 451 - DNA, 50 bp, Homo sapiens
aagcaactgaatcttcagcatgttctcatcggcggagccttcttgtgtaa

SEQ ID NO: 452 - DNA, 50 bp, Homo sapiens
tgattggagcactgaggaacaagggaatgaaaaggcagactctctgaacg

SEQ ID NO: 453 - DNA, 50 bp, Homo sapiens
ttgtccaaacgaagcagccgtggtagtagctgtctatgattcttgctcag

SEQ ID NO: 454 - DNA, 50 bp, Homo sapiens
tggtgcaatagaagctgcaaagatgtgccactttatctatgaaatggagt

SEQ ID NO: 455 - DNA, 50 bp, Homo sapiens
ggcttccatgtccagaatcctgcttaaggttttagggtaccttcagtact

SEQ ID NO: 456 - DNA, 50 bp, Homo sapiens
ttttggccagcttttctagataaggttgtattgctactgcaactaacaaa

SEQ ID NO: 457 - DNA, 50 bp, Homo sapiens
cacacatcctggtacccttggtcttcaaaggccatttccagcagaccctc

SEQ ID NO: 458 - DNA, 50 bp, Homo sapiens
aaacatgtctttttctcgcctcaactttatccacatgaaatgtgtgccca

SEQ ID NO: 459 - DNA, 50 bp, Homo sapiens
taagcataaaacctgacacgttaaaatccctgccctttggtgagcccact

SEQ ID NO: 460 - DNA, 50 bp, Homo sapiens
aacttgcattttagcagtgcatgtttctaattgacttactgggaaactga

SEQ ID NO: 461 - DNA, 50 bp, Homo sapiens
aggcctcaggccacctccaggaacagaacacagttttaagtttgattttt

SEQ ID NO: 462 - DNA, 50 bp, Homo sapiens
tgagtcttagcaatatgggagcaggttttcactgaattctgagggtgcct

SEQ ID NO: 463 - DNA, 50 bp, Homo sapiens
gttgtcctggcacacaaggaggcgaggctatgcgttcgaggccaacctag

SEQ ID NO: 464 - DNA, 50 bp, Homo sapiens
tgggaacacatagaactgatggaggcttttcctaaggccaaggataatgt

SEQ ID NO: 465 - DNA, 50 bp, Homo sapiens
ggattgaacagttcagttgtatctatgccccacagtgaccagtaaagtcc

SEQ ID NO: 466 - DNA, 50 bp, Homo sapiens
cgatgactcattacccaatccccatgaacttgtttcagatttgctctgtt

SEQ ID NO: 467 - DNA, 50 bp, Homo sapiens
gtcgcaaaggggataatctgggaaagacaccaaatcatgggctcacttta

SEQ ID NO: 468 - DNA, 50 bp, Homo sapiens
actcaagctcacacctgtacctgatgggaatgaacataatgtgaagaaac

SEQ ID NO: 469 - DNA, 50 bp, Homo sapiens
caccaaaatagttatgttggcactgtgttcacacgcatggtccccacacc

SEQ ID NO: 470 - DNA, 50 bp, Homo sapiens
gtgcgctttcttttacaacaagcctctagaaacagatagtttctgagaat

SEQ ID NO: 471 - DNA, 50 bp, Homo sapiens
gtgtgtataatgtaaagtagttttgcatattcttgtgctgcacatgggct

SEQ ID NO: 472 - DNA, 50 bp, Homo sapiens
aggaatccttttctacatttgagcaaatactgaggttcatgttgtaccaa

SEQ ID NO: 473 - DNA, 50 bp, Homo sapiens
cgccttggctttgtgttagcatttcctcctgaagtgttctgttggcaata

SEQ ID NO: 474 - DNA, 50 bp, Homo sapiens
agagattttctattgctgggaaggtgtgtttctcccacaatttgtttgtg

SEQ ID NO: 475 - DNA, 50 bp, Homo sapiens
tgcaaccaaattggctttaccatcttggctttagtaggtatagaagacaa

SEQ ID NO: 476 - DNA, 50 bp, Homo sapiens
tgtcaaataaaagagaacgaacaggtagtttggtggagctgagctagtgt

SEQ ID NO: 477 - DNA, 50 bp, Homo sapiens
tcctgtagaaaacgaactgtaaaagaccatgcaagaggcaaaataaaact

SEQ ID NO: 478 - DNA, 50 bp, Homo sapiens
acagtagctttgtagtgggttttctgtgctgtgctttttaatttcatgta

SEQ ID NO: 479 - DNA, 50 bp, Homo sapiens
gattcctgtcatgaaggaaagcaagacagctcacagaccagcggcatctg

SEQ ID NO: 480 - DNA, 50 bp, Homo sapiens
ttttctgtacctttctaaacctctcttccctctgtgatggttttgtgttt

SEQ ID NO: 481 - DNA, 50 bp, Homo sapiens
aaatcttattcctcctcttctcccctcacttttccctacttcctctgcaa

SEQ ID NO: 482 - DNA, 50 bp, Homo sapiens
tggaatcagacatcttccagatggtttggaccctgtccatgtgtaggtca

SEQ ID NO: 483 - DNA, 50 bp, Homo sapiens
aatttagcacctcaggaataacttattggtttaggtcagttcttggcggg

SEQ ID NO: 484 - DNA, 50 bp, Homo sapiens
aaccatgtaactccattgaacatttttcaacttaaggtctgcatagcaga

SEQ ID NO: 485 - DNA, 50 bp, Homo sapiens
aaaccaggttaatggctaagaatgggtaacatgactcttgttggattgtt

SEQ ID NO: 486 - DNA, 50 bp, Homo sapiens
ctcttggctgagcttctacagggctgagagctgcgctttggggacttcag

SEQ ID NO: 487 - DNA, 50 bp, Homo sapiens
tttcctttggggcatgatgttttaacctttgctttagaagcacaagctgt

SEQ ID NO: 488 - DNA, 50 bp, Homo sapiens
atagaatgagcttggttaagcacctctcctttgcccttcaccctgactcc

SEQ ID NO: 489 - DNA, 50 bp, Homo sapiens
ttgagtagaactctgattttccctagaggccaaattctttttatctgggt

SEQ ID NO: 490 - DNA, 50 bp, Homo sapiens
ttctaaacacattcttgatcaccaaacaacttcagaaagacagtgactgt

SEQ ID NO: 491 - DNA, 50 bp, Homo sapiens
tggagttgcttccagctgccaaggcctgtgacagaattcgctgttaagag

SEQ ID NO: 492 - DNA, 50 bp, Homo sapiens
aatgatgcaaagttttattcttgaacttggacactgatgccatcaaacaa

SEQ ID NO: 493 - DNA, 50 bp, Homo sapiens
ggccagtaaattccatgtttttggctatatctcatccaaactgagcagtt

SEQ ID NO: 494 - DNA, 50 bp, Homo sapiens
ttcccattgtcctcctactcaactaaaattcatagttggctttaagccca

SEQ ID NO: 495 - DNA, 50 bp, Homo sapiens
gcatgtcctaatgcttgctgctgatttaaacacattaaaggtactttgca

SEQ ID NO: 496 - DNA, 50 bp, Homo sapiens
acaatggcataaaagtaactttctctgaagatgtgatgttcaggctgtga

SEQ ID NO: 497 - DNA, 50 bp, Homo sapiens
aatggaaggcaggtgaagatataaaaccctagaatgcttaaatgtgctgt

SEQ ID NO: 498 - DNA, 50 bp, Homo sapiens
ttaatgccagtcctcatgtaacctcaggtatcttcagcttgtggagaata

SEQ ID NO: 499 - DNA, 50 bp, Homo sapiens
tggagtatatgcctgaaaaggttttggattcagaaagaaaaaggatggtt

SEQ ID NO: 500 - DNA, 50 bp, Homo sapiens
aaagtaaggcatggttgtggttaatctggtttatttttgttccacaagtt

SEQ ID NO: 501 - DNA, 50 bp, Homo sapiens
ggtgtgtgtgtccagagtgagcaaggattatgtttttggattgtcaaaga

SEQ ID NO: 502 - DNA, 50 bp, Homo sapiens
aaccatttgcctctggctgtgtcacagggtgagccccaaaattggggttc

SEQ ID NO: 503 - DNA, 50 bp, Homo sapiens
gaaagtggagaggacctaacatatgtctctacctagaaaggatggtttca

SEQ ID NO: 504 - DNA, 50 bp, Homo sapiens
accaactataaacccagttctaaagttgtgtatgatggtgaacctttggg

SEQ ID NO: 505 - DNA, 50 bp, Homo sapiens
ggacctgagacactgtggctgtctaatgtaatcctttaaaaattctctgc

SEQ ID NO: 506 - DNA, 50 bp, Homo sapiens
tttggtgttcagttactgagtttcaaaaatgttttggtggcatgaggaca

SEQ ID NO: 507 - DNA, 50 bp, Homo sapiens
cctgtttaagaaagtgaaatgttatggtctcccctcttccaatgagctta

SEQ ID NO: 508 - DNA, 50 bp, Homo sapiens
acggaccaggccattcattattcctcaagtgttaatatactgacttatgc

SEQ ID NO: 509 - DNA, 50 bp, Homo sapiens
acagttttgtcaaaaagtgtatcttgaccccaccatcagtactccattct

SEQ ID NO: 510 - DNA, 50 bp, Homo sapiens
tttggttcatccgtgtgctgttcttttgggttctgagagggttttgccat

SEQ ID NO: 511 - DNA, 50 bp, Homo sapiens
ggcagtaatgcaagagtccttttgtgaagagtgtttctatgtagagatgt

SEQ ID NO: 512 - DNA, 50 bp, Homo sapiens
aaatgcagagcagaatggaccagtggatggacaaggagacaacccaggcc

SEQ ID NO: 513 - DNA, 50 bp, Homo sapiens
agtgttcctgctgccagttctttcctctttaggcgtggttgagaaaaagc

SEQ ID NO: 514 - DNA, 50 bp, Homo sapiens
cagtctctgccacttgtgctagtttttgtgtggtgtttagaaacatgggc

SEQ ID NO: 515 - DNA, 50 bp, Homo sapiens
ttccacttaggtttggcattttggcagataagctaatcttgtataaagca

SEQ ID NO: 516 - DNA, 50 bp, Homo sapiens
gtaaatgccctacatggtgtgatgctgcattatatataaaactgtgtgca

SEQ ID NO: 517 - DNA, 50 bp, Homo sapiens
agctcctgtgctgaccttcaagttacgttttggaactgtaatactaaagg

SEQ ID NO: 518 - DNA, 50 bp, Homo sapiens
acactagggaagaaccttaattctaaatttggttcatgtgtggcaaagtt

SEQ ID NO: 519 - DNA, 50 bp, Homo sapiens
taactggaatcactgccctgctgtaattaaacattctgtaccacatctgt

SEQ ID NO: 520 - DNA, 50 bp, Homo sapiens
cccccagtgctttgtagtctctcctatgtcataataaagctacattttct

SEQ ID NO: 521 - DNA, 50 bp, Homo sapiens
gacagacttggacacaaaaccgatccatagaagggcttcccaaaccttgt

SEQ ID NO: 522 - DNA, 50 bp, Homo sapiens
ccatatgtaacttgttttgaagagaagtgtttccgttgtgtgtcttgatg

SEQ ID NO: 523 - DNA, 50 bp, Homo sapiens
gtatcatctgccaagaccagggcctgcttcaccacagccacaataaagtc

SEQ ID NO: 524 - DNA, 50 bp, Homo sapiens
aatgaaccatttacagttcggttttggactctgagtcaaaggattttcct

SEQ ID NO: 525 - DNA, 50 bp, Homo sapiens
gccgagtcagcacatgggtagagatgatgtaaaagcagccaatctggaaa

SEQ ID NO: 526 - DNA, 50 bp, Homo sapiens
accttctgggaggagggtcggattcaatctgaacttagaactttcaactc

SEQ ID NO: 527 - DNA, 50 bp, Homo sapiens
gcaccatgtagaattttcactttgtactggcaggctcgttttacctcatt

SEQ ID NO: 528 - DNA, 50 bp, Homo sapiens
tctccagtcctgattactgtacacagtagctttagatggcgtggacgtga

SEQ ID NO: 529 - DNA, 50 bp, Homo sapiens
ttcctgttactggcatgtgcacgactatgttattagaagccactttatca

SEQ ID NO: 530 - DNA, 50 bp, Homo sapiens
gccagcttggaggatggacatttctggatacacatacacatacaaaacag

SEQ ID NO: 531 - DNA, 50 bp, Homo sapiens
tcagctccttgatctaagcctcccagagagacccctagaatgtttccctc

SEQ ID NO: 532 - DNA, 50 bp, Homo sapiens
ccggcggcaggaactatcagtagacagctgctgcttccatgaaacggaaa

SEQ ID NO: 533 - DNA, 50 bp, Homo sapiens
tgttgccttgaatataacagtacaatttgtcaattactctgcaccaggct

SEQ ID NO: 534 - DNA, 50 bp, Homo sapiens
aaaagtaacaccctccctttttcctgacagttctttcagctttacagaac

SEQ ID NO: 535 - DNA, 50 bp, Homo sapiens
aatgaaatgtagttgggttcttcctgtaatgcgctattatgtcttgggct

SEQ ID NO: 536 - DNA, 50 bp, Homo sapiens
aacctccttgtgtctgtttctctgttcctctgtggctgactcaataaact

SEQ ID NO: 537 - DNA, 50 bp, Homo sapiens
gtgggagggtgagatgtgaagatgtgggatgaacctggaatgaacgaatt

SEQ ID NO: 538 - DNA, 50 bp, Homo sapiens
ggcctaaagaaagctggggttaatcctgaagctaaaagtaaatgtttctt

SEQ ID NO: 539 - DNA, 50 bp, Homo sapiens
tcccatcctttccatcaagaccttcattagcttatgatatttgctgccga

SEQ ID NO: 540 - DNA, 50 bp, Homo sapiens
ggaggtctcttccagattgctcttctgccgaattatttgtatctattccg

SEQ ID NO: 541 - DNA, 50 bp, Homo sapiens
gcacacctcgtcagaggaccataaccgtgtggggacaataaccgcagggg

SEQ ID NO: 542 - DNA, 50 bp, Homo sapiens
acaatggatttgtgaagagcagattccatgagtaactctgacaggtattt

SEQ ID NO: 543 - DNA, 50 bp, Homo sapiens
tgagagacattgttaattttgggggaattggcattgcgaaagacttgaaa

SEQ ID NO: 544 - DNA, 50 bp, Homo sapiens
tgctagacatttctatactctgttgtaacactgaggtatctcatttgccc

SEQ ID NO: 545 - DNA, 50 bp, Homo sapiens
gtgggggatgggggttaaaaagtagagaacctcctttctgttcaactaat

SEQ ID NO: 546 - DNA, 50 bp, Homo sapiens
caggtgagtagttgccgcgtaatatcattggagtacattctttatactgt

SEQ ID NO: 547 - DNA, 50 bp, Homo sapiens
ccccaaccttattctgtgtgtagacattgtattccacaattttgaatggc

SEQ ID NO: 548 - DNA, 50 bp, Homo sapiens
cgaatggcttaaactaatttgctatgatcctctaacaccgaaatttccca

SEQ ID NO: 549 - DNA, 50 bp, Homo sapiens
agagggaatcagaaaaatgccaagccttttctctttgaatgtgctatttt

SEQ ID NO: 550 - DNA, 50 bp, Homo sapiens
cacccttctctgttaaccttgtgcctgtctcctgtatgatcacatcacca

SEQ ID NO: 551 - DNA, 50 bp, Homo sapiens
tgtgtctctgtcgcgtctgctgtgaagcacatgatgctctatttattgta

SEQ ID NO: 552 - DNA, 50 bp, Homo sapiens
tgagagtaagcacatgacagcgtctgcttgcgttgtgtctgttttatgtt

SEQ ID NO: 553 - DNA, 50 bp, Homo sapiens; identical to SEQ ID NO: 153

SEQ ID NO: 554 - DNA, 50 bp, Homo sapiens
tgcaacgaatatggataccacatagtactttggtgttacctgcttttgaa

SEQ ID NO: 555 - DNA, 50 bp, Homo sapiens
agaactgaatcagtcggaggaacctgaggcaggcgagagtagtactggag

SEQ ID NO: 556 - DNA, 50 bp, Homo sapiens
ttgccatgagataacacagtgtaaacagtagacacccagaaatcgtgact

SEQ ID NO: 557 - DNA, 50 bp, Homo sapiens
gctgttaggctaagagggtgcagggctagacacgaagcttaaactattca

SEQ ID NO: 558 - DNA, 50 bp, Homo sapiens
ccagtgtggaggtagcaaagcatctatctattctgaatcatgtttggaaa

SEQ ID NO: 559 - DNA, 50 bp, Homo sapiens
gccagtatgccacagaatgtcctaaacccttgctgcctcttatcaaaacc

SEQ ID NO: 560 - DNA, 50 bp, Homo sapiens
tttgtactgttgaaaccacttcattggacatgttgcaatagcaaaacccc

SEQ ID NO: 561 - DNA, 50 bp, Homo sapiens
agggggaacattgtaaagaaacaaaaaggtccagatgaatgtatgctaga

SEQ ID NO: 562 - DNA, 50 bp, Homo sapiens
ggtgctgaatatgtccttgtaggctctgttttaagaaaacaatatgtggg

SEQ ID NO: 563 - DNA, 50 bp, Homo sapiens
acattggcttgcttttgttaaagtgcaagtgttacatatggctttgtaca

SEQ ID NO: 564 - DNA, 50 bp, Homo sapiens
ttggtagtgtcagcgggcaccttttacaccttctagtagctcaagctagt

SEQ ID NO: 565 - DNA, 50 bp, Homo sapiens
tcctggaatcgtttaatctaaagcagtttcccctgttttggagattttgt

SEQ ID NO: 566 - DNA, 50 bp, Homo sapiens; identical to SEQ ID NO: 565

SEQ ID NO: 567 - DNA, 50 bp, Homo sapiens
tgagaaagtcctgtgcagtcctgagatgattactcttatttggtgtgctg

SEQ ID NO: 568 - DNA, 50 bp, Homo sapiens
tcgtcttttgcgaatggcttaattctgacactacctttctgggaaatgtt

SEQ ID NO: 569 - DNA, 50 bp, Homo sapiens
tttgattgtgtctgatgggaactgagttgttggcctttgtgaaatgaaat

SEQ ID NO: 570 - DNA, 50 bp, Homo sapiens
ttgacaaagcccaacaatgatctcaggaattacattttccaacagaccaa

SEQ ID NO: 571 - DNA, 50 bp, Homo sapiens
acctgtcacgcttctagttgcttcaaccattttataaccatttttgtaca

SEQ ID NO: 572 - DNA, 50 bp, Homo sapiens
tccttaaggtgcacagtaaatgtacagatagttataggccactgttttgt

SEQ ID NO: 573 - DNA, 50 bp, Homo sapiens
agctcatatgaacactgctctgaactcctctgacttagcattcaacttaa

SEQ ID NO: 574 - DNA, 50 bp, Homo sapiens
catgacaaacattactagcatgttcaactgcaccatgttctggcactgta

SEQ ID NO: 575 - DNA, 50 bp, Homo sapiens
acctctttcctaccaatttcacattttgcagaaacttgttcacatttcca

SEQ ID NO: 576 - DNA, 50 bp, Homo sapiens
gggttgtgtattaaatagccattcattctggaactcaaggacaggactgt

SEQ ID NO: 577 - DNA, 50 bp, Homo sapiens
gccttgcaggtgaccagcagtgtcattgtatttatatacagagcttatga

SEQ ID NO: 578 - DNA, 50 bp, Homo sapiens
ctggacgggcgtgggttctgggtcagcttcttttacctcaattttgtttg

SEQ ID NO: 579 - DNA, 50 bp, Homo sapiens
aaagtctgaggtgtggaacagttatttaagcattagtcaaccctggtcct

SEQ ID NO: 580 - DNA, 50 bp, Homo sapiens
tgggcaagacatgattaatgaatcagaatcctgtttcattggtgacttgg

SEQ ID NO: 581 - DNA, 50 bp, Homo sapiens
cctgtgtaaaagaagaaatacaagagactcaaacacctacacattcacgg

SEQ ID NO: 582 - DNA, 50 bp, Homo sapiens
tggcttgttcatcctccagatgtagctattgatgtacacttcgcaacgga

SEQ ID NO: 583 - DNA, 50 bp, Homo sapiens
aactatcagcttggatggtcacttgaatagaagatggttatacacagtgt

SEQ ID NO: 584 - DNA, 50 bp, Homo sapiens
ccacggtggaccctgtttgttttaaatattctgttcccatgtcaatcagt

SEQ ID NO: 585 - DNA, 50 bp, Homo sapiens
ttgtgtaggaaacttttgcagtttgacactaagataacttctgtgtgcat

SEQ ID NO: 586 - DNA, 50 bp, Homo sapiens
actcaaatcagttagcttcaaacaaaaacgaaagttagaccaagggaacg

SEQ ID NO: 587 - DNA, 50 bp, Homo sapiens; identical to SEQ ID NO: 586

SEQ ID NO: 588 - DNA, 50 bp, Homo sapiens
ttgtgtgctgtgcttcaaagccttaactgtcaaatcttgcattatcttgt

SEQ ID NO: 589 - DNA, 50 bp, Homo sapiens
acattatcatggcatgacttaagggaacattggtttgtgaaggaaaaaca

SEQ ID NO: 590 - DNA, 50 bp, Homo sapiens
tgtgtgactttcatgcttctggggttggagcttaaagatccaaactgaga

SEQ ID NO: 591 - DNA, 50 bp, Homo sapiens
tgctggtattctcactgccacatttttggaaacctgtattacaccttaaa

SEQ ID NO: 592 - DNA, 50 bp, Homo sapiens
ttgagtgtctgcagcagccctggacttccagacttctatcacatgagaaa

SEQ ID NO: 593 - DNA, 50 bp, Homo sapiens
tggtgctgatgcttagttgtctcatgccattaaattgtaaaagtgagttg

SEQ ID NO: 594 - DNA, 50 bp, Homo sapiens
ggaggtcagttgatttccccaggtacattcatggtgtgacagacacatgg

SEQ ID NO: 595 - DNA, 50 bp, Homo sapiens
agatcctttcagtccctagacctccattcactctgtttctcttctgctgg

SEQ ID NO: 596 - DNA, 50 bp, Homo sapiens
gatccgatcatggtgatgtacggggtgaattctcttgccgtgttgcaaat

SEQ ID NO: 597 - DNA, 50 bp, Homo sapiens
atggtttcaaaattcaaggtccccaaatggcagcattttatgttctgacc

SEQ ID NO: 598 - DNA, 50 bp, Homo sapiens
caagtatgtatgcaactttgcacaccaacaactgttaatctgtagctagt

SEQ ID NO: 599 - DNA, 50 bp, Homo sapiens
tggtgattctccaggccatttaataccctgcaatgtaattgtccctctgt

SEQ ID NO: 600 - DNA, 50 bp, Homo sapiens
ttctgcctcaatgtttactgtgcctttgtttttgctagtttgtgttgttg

SEQ ID NO: 601 - DNA, 50 bp, Homo sapiens
actactgtcacgtagctgtgtacaaagagatgtgaaatactttcaggcaa

SEQ ID NO: 602 - DNA, 50 bp, Homo sapiens
tgttgaacggttaaactgtgcatttctcattttgatgtgtcatgtatgtt

SEQ ID NO: 603 - DNA, 50 bp, Homo sapiens
aatggtcaaggttcagcatattctatatgaagatcacaaggtggtatcgt

SEQ ID NO: 604 - DNA, 50 bp, Homo sapiens
tgtgaacttgtgcgcaaatgtgcagattcaatgttcttgttacagattga

SEQ ID NO: 605 - DNA, 50 bp, Homo sapiens
ccccttgggctcagcacgaaagggctttcaatgaattaagtgaaaacttt

SEQ ID NO: 606 - DNA, 50 bp, Homo sapiens
aatgagttgtgttgaagcctccgtctcccatccttgcctgtagcccgtag

SEQ ID NO: 607 - DNA, 50 bp, Homo sapiens
agcctaaacatgtatactgtgcattttatgggtgactttgaaagatctgt

SEQ ID NO: 608 - DNA, 50 bp, Homo sapiens
accaggttttagcaaaatgcacacttttggctctttttggtatatgttct

SEQ ID NO: 609 - DNA, 50 bp, Homo sapiens
cctgactcctccttgcaaacaaaatgatagttgacactttatcctgattt

SEQ ID NO: 610 - DNA, 50 bp, Homo sapiens
ttgtattggcataatcagtgacttgtacattcagcaatagcatttgagca

SEQ ID NO: 611 - DNA, 50 bp, Homo sapiens
ttgttaagttgcaattactgcaatgacagaccaataaacaattgctgcca

SEQ ID NO: 612 - DNA, 50 bp, Homo sapiens
acagcaaactttggcatttatgtggagcatttctcattgttggaatctga

SEQ ID NO: 613 - DNA, 50 bp, Homo sapiens
tggtcattctgctgtgttcattaggtgccaatgtgaagtctggattttaa

SEQ ID NO: 614 - DNA, 50 bp, Homo sapiens
ggcatgaaatgagggacaaagaaagcatctcgtaggtgtgtctactgggt

SEQ ID NO: 615 - DNA, 50 bp, Homo sapiens
aatcttgacacatgcaattgtaaataaaagtcaccacttttgccaagctt

SEQ ID NO: 616 - DNA, 50 bp, Homo sapiens
tgatgccttcatctgttcagtcatctccaaaaacagtaaaaataaccact

SEQ ID NO: 617 - DNA, 50 bp, Homo sapiens
ggccaagctgaatgccatgaatatcagtgagacgcgttataaggaatcct

SEQ ID NO: 618 - DNA, 50 bp, Homo sapiens
cctgccagtgtcagaaaatcctatttatgaatcctgtcggtattccttgg

SEQ ID NO: 619 - DNA, 50 bp, Homo sapiens
tcaagaatttgggtgggagaaaagaaagtgggttatcaagggtgatttga

SEQ ID NO: 620 - DNA, 50 bp, Homo sapiens
caaactggtgcagaaattctataaactctttgctgtttttgatacctgct

SEQ ID NO: 621 - DNA, 50 bp, Homo sapiens
gctacttgtttacattgtacactgcgaccaccttgccgcttttcatcaca

SEQ ID NO: 622 - DNA, 50 bp, Homo sapiens
actggatgctacagacttataacagcatagtgaatggtaagactagtgca

SEQ ID NO: 623 - DNA, 50 bp, Homo sapiens
cctcccctatgcctcagccccatctctgctcctgtttgaattttgttatt

SEQ ID NO: 624 - DNA, 50 bp, Homo sapiens
ccagtgtgactagggatcctgagttttctgggacaattccagctttaatc

SEQ ID NO: 625 - DNA, 50 bp, Homo sapiens
tgacccttctttaagttatgtgtgtggggagaaatagaatggtgctctta

SEQ ID NO: 626 - DNA, 50 bp, Homo sapiens
gtgtgagtcctctgtttgcactggacatattccctacctgtcttatttca

SEQ ID NO: 627 - DNA, 50 bp, Homo sapiens
aggggaaggggtgcctggcgggtacttttctatcttttatttccagattt

SEQ ID NO: 628 - DNA, 50 bp, Homo sapiens
tcatgcttctgccctgtcaaaggtccctatttgaaatgtgttataataca

SEQ ID NO: 629 - DNA, 50 bp, Homo sapiens
agctagcagatcgtagctagtttgtattgtcttgtcaattgtacagactt

SEQ ID NO: 630 - DNA, 50 bp, Homo sapiens
agcccagaattcccaaaggcattaggtttcccaactgctttgtgctgata

SEQ ID NO: 631 - DNA, 50 bp, Homo sapiens
gtgtctatacatttctaagccttgtttgcagaataaacagggcatttagc

SEQ ID NO: 632 - DNA, 50 bp, Homo sapiens
tagaggtgtacagatgctatattatatccgctcccggtgtactgcagccc

SEQ ID NO: 633 - DNA, 50 bp, Homo sapiens
ttttacaaggaaggggtagtaattggcccactctcttcttactggaggct

SEQ ID NO: 634 - DNA, 50 bp, Homo sapiens
acacggtgaactggctgtgtccatctttgtcactgagtgaaatctctgtt

SEQ ID NO: 635 - DNA, 50 bp, Homo sapiens
tgaggacttggggcaggaaaggaatgctgctgaacttgaatttcccttta

SEQ ID NO: 636 - DNA, 50 bp, Homo sapiens
tcagaccttggatcagatgaactcttagaaatgaaggcagaaaaatgtca

SEQ ID NO: 637 - DNA, 50 bp, Homo sapiens
ccacgttcttgttccgatactctgagaagtgcctgatgttgatgtactta

SEQ ID NO: 638 - DNA, 50 bp, Homo sapiens
gcctgggtcagatttttattgtggggtgggatgagtaggacaacatattt

SEQ ID NO: 639 - DNA, 50 bp, Homo sapiens
gggtgcccacctgcatgtgaaggggaggcagttctcaatttatttcaata

SEQ ID NO: 640 - DNA, 50 bp, Homo sapiens
cagtcactgggtctatattaaacagcaaccagagcaacaaatggcaaaca

SEQ ID NO: 641 - DNA, 50 bp, Homo sapiens
tgacatggtagcagaaataggcccttttatgtgttgcttctattttacct

SEQ ID NO: 642 - DNA, 50 bp, Homo sapiens
agcaaagaacagtttggtggtcttttctcttccactgatttttctgtaat

SEQ ID NO: 643 - DNA, 50 bp, Homo sapiens
agccctgctaaactatgtacagaggaaactgttcaagtattggatttgaa

SEQ ID NO: 644 - DNA, 50 bp, Homo sapiens
tgtcaacgatgtttccagtagtgtttagatttggtgtcttcaaaggtagt

SEQ ID NO: 645 - DNA, 50 bp, Homo sapiens
ggctttttgcccatcaagaataaaaagaaataaaaccaaagggttaccgg

SEQ ID NO: 646 - DNA, 50 bp, Homo sapiens
tgcctgttgcacatcttgtaaaattggacaatggctctttagagagttat

SEQ ID NO: 647 - DNA, 50 bp, Homo sapiens
tgcggctagttcagagagatttttagagctgtggtggacttcatagatga

SEQ ID NO: 648 - DNA, 50 bp, Homo sapiens
aatggaaggattagtatggcctatttttaaagctgctttgttaggttcct

SEQ ID NO: 649 - DNA, 50 bp, Homo sapiens
ccatgtgggctactcatgatgggcttgattctttgggaataataaaatga

SEQ ID NO: 650 - DNA, 50 bp, Homo sapiens
aacgaggccagtggggaacccttacctaagtatgtgattgacaaatcatg

SEQ ID NO: 651 - DNA, 50 bp, Homo sapiens
cctctcaggacgtgccgggtttatcattgctttgttatttgtaaggactg

SEQ ID NO: 652 - DNA, 50 bp, Homo sapiens
ccactgcctgaaaggtttgtacagatgcatgccacagtagatgtccacat

SEQ ID NO: 653 - DNA, 50 bp, Homo sapiens
ttttgggataaattttactggttgctgttgtggagaaggtggcgtttcca

SEQ ID NO: 654 - DNA, 50 bp, Homo sapiens
tgaagtataagcctctactgggtctatattgtgaatcatcctgcctttca

SEQ ID NO: 655 - DNA, 50 bp, Homo sapiens
ctcgtctattggcccctgtagaaagttaacctttgttgttttccttttat

SEQ ID NO: 656 - DNA, 50 bp, Homo sapiens
tccccttctgtcccctagtaagcccagttgctgtatctgaacagtttgag

SEQ ID NO: 657 - DNA, 50 bp, Homo sapiens
aaacctatttcccttgcctcataggcttctgggatgtcatcacctccagt

SEQ ID NO: 658 - DNA, 50 bp, Homo sapiens
gaatttggtggtgtcaattgcttatttgttttcccacggttgtccagcaa

SEQ ID NO: 659 - DNA, 50 bp, Homo sapiens
ctattttgggtcatttttatgtacctttgggttcaggcattatttggggg

SEQ ID NO: 660 - DNA, 50 bp, Homo sapiens
taattgttgaacaggtgtttttccacaagtgccgcaaattgtaccttttt

SEQ ID NO: 661 - DNA, 50 bp, Homo sapiens
ccccctcagaagaatcatgaatttgcaacagacctaatttttggttactt

SEQ ID NO: 662 - DNA, 50 bp, Homo sapiens
ggcctttccattccatttattcacactgagtgtcctacaataaacttccg

SEQ ID NO: 663 - DNA, 50 bp, Homo sapiens
tggtgtctcaaaggagtaactgcagcttggtttgaaatttgtactgtttc

SEQ ID NO: 664 - DNA, 50 bp, Homo sapiens
tgccagtagtgaccaagaacacagtgattatatacactatactggaggga

SEQ ID NO: 665 - DNA, 50 bp, Homo sapiens
aggacacatctgacatcctgtgtttggttaaaatatacagcacattgtga

SEQ ID NO: 666 - DNA, 50 bp, Homo sapiens
tgggggttgtaaattggcatggaaatttaaagcaggttcttgttagtgca

SEQ ID NO: 667 - DNA, 50 bp, Homo sapiens
tgtgaaagaaacttgcttgcagctttaacaaaatgagaaacttcccaaat

SEQ ID NO: 668 - DNA, 50 bp, Homo sapiens
gtatatatcctccagcattcagtccagggggagccacggaaaccatgttc

SEQ ID NO: 669 - DNA, 50 bp, Homo sapiens
tgtgatgctaggaacatgagcaaactgaaaattactatgcacttgtcaga

SEQ ID NO: 670 - DNA, 50 bp, Homo sapiens
aacccagtatatctgtgttatctgatgggacggttgacagtggtcaggga

SEQ ID NO: 671 - DNA, 50 bp, Homo sapiens
atccagtggcctaggaattaaagtgttgttgtttttgctgttaaattgga

SEQ ID NO: 672 - DNA, 50 bp, Homo sapiens
gcattggcagcattgtgtctttgaccttgtatactagcttgacatagtgc

SEQ ID NO: 673 - DNA, 50 bp, Homo sapiens
tttcatggtgtgaaggaaggagcgtggtgcattggacatgggtctgacac

SEQ ID NO: 674 - DNA, 50 bp, Homo sapiens
agactgcacaaccaagaagttactcaaagctctgtgggagcccctgcctg

SEQ ID NO: 675 - DNA, 50 bp, Homo sapiens
cagtgctcacctaaatccatctgactacttgttcctgtgccctcttgttt

SEQ ID NO: 676 - DNA, 50 bp, Homo sapiens
gtgacgacgacctgaaggagacgggcttccaccttaccaccacgaaccag

SEQ ID NO: 677 - DNA, 50 bp, Homo sapiens
aacaggataaagctcgccgggaatgggaaagacagaagagaagggaaatg

SEQ ID NO: 678 - DNA, 50 bp, Homo sapiens
cctcacccccaccctcactttcaatccgtttgataccatttggctccttt

SEQ ID NO: 679 - DNA, 50 bp, Homo sapiens
atggaaagatgtggtctgagatgggtgctgcaaagatcataataaagtca

SEQ ID NO: 680 - DNA, 50 bp, Homo sapiens
ccatgacttcacagacatggtctagaatctgtacccttacccacatatga

SEQ ID NO: 681 - DNA, 50 bp, Homo sapiens
ctgtgaatgtttgcagtctcctaccgtctcaactacagctgcagttgcta

SEQ ID NO: 682 - DNA, 50 bp, Homo sapiens
cagcctgaattgcctctgggaagaggggtgggaatgacttttcaatgtac

SEQ ID NO: 683 - DNA, 50 bp, Homo sapiens
aatggcctagaatttgtggtagttgccaaagaggttctcctaggtggtct

SEQ ID NO: 684 - DNA, 50 bp, Homo sapiens
cagtgaaaagtttgtgagtgaagaatgctgagaagattgtaatgctttgt

SEQ ID NO: 685 - DNA, 50 bp, Homo sapiens
ttgtctcaaagctaccaagtttgtgcaataagtggaagggatgtcatcct

SEQ ID NO: 686 - DNA, 50 bp, Homo sapiens
acatcgaaggtgtgcatatatgttgaatgacattttagggacatggtgtt

SEQ ID NO: 687 - DNA, 50 bp, Homo sapiens
ggctatctcaggcaatatggccagcacctgggtctttatgcatgaagata

SEQ ID NO: 688 - DNA, 50 bp, Homo sapiens
gctgtcacggagcgactgtcgagatcgcctagtatgttctgtgaacacaa

SEQ ID NO: 689 - DNA, 50 bp, Homo sapiens
agctgctgacttgactgtcatcctgttcttgttagccattgtgaataaga

SEQ ID NO: 690 - DNA, 50 bp, Homo sapiens
ctcacaggtggactgagaaatcagttacatcttaagtgacctacagggta

SEQ ID NO: 691 - DNA, 50 bp, Homo sapiens
gtgcattgtatttagtctgtattgatcatggatgccctccttaatagcca

SEQ ID NO: 692 - DNA, 50 bp, Homo sapiens
cctgtacaattgcatcacgggtggggataaaaagaggaatattctggttt

SEQ ID NO: 693 - DNA, 50 bp, Homo sapiens
aaacagagctgtcttcagcaacattattagtagacaaagaggatgtggat

SEQ ID NO: 694 - DNA, 50 bp, Homo sapiens
actcaagttttcagtttgtaccgcctggtatgtctgtgtaagaagccaat

SEQ ID NO: 695 - DNA, 50 bp, Homo sapiens
tgactcctgccaagaaatcctttcttagaaggttgtttgattagttttgc

SEQ ID NO: 696 - DNA, 50 bp, Homo sapiens
ttgtattatctgctttgctgatgtagacaagagttaactgagtagcatgc

SEQ ID NO: 697 - DNA, 50 bp, Homo sapiens
aaagattgttggttaggccagattgacacctatttataaaccatatgcgt

SEQ ID NO: 698 - DNA, 50 bp, Homo sapiens
tggtaactgttccaggattgctccaggtttgagatggtattgctaaattt

SEQ ID NO: 699 - DNA, 50 bp, Homo sapiens
tgcaccttgtagtggattctgcatatcatctttcccacctaaaaatgtct

SEQ ID NO: 700 - DNA, 50 bp, Homo sapiens
cactagcacttgtgatgcaatagaacacttcgcctgtactgaaagggcca

SEQ ID NO: 701 - DNA, 50 bp, Homo sapiens
acgcaggctttcctatttctacaactgattgtacttatgcattttgtacc

SEQ ID NO: 702 - DNA, 50 bp, Homo sapiens
caggagctactttgagtttggtgttactaggatcagggtcagtctttggc

SEQ ID NO: 703 - DNA, 50 bp, Homo sapiens
tagagagaggcccgtggcctgaggtagtgcagaggaggatagtagagcag

SEQ ID NO: 704 - DNA, 50 bp, Homo sapiens
ttttggaagattttcagtctagttgccaaatctggctcctttacaaaaga

SEQ ID NO: 705 - DNA, 50 bp, Homo sapiens
aagttaattgaggcaatgtcatctgctcaaagttgagtggtttattcaca

SEQ ID NO: 706 - DNA, 50 bp, Homo sapiens
ttgcagtgtattactgtcagcagtatggtagctcaccgtggacgttcggc

SEQ ID NO: 707 - DNA, 50 bp, Homo sapiens
tattctgtgttaatggctaacctgttacactgggctgggttgggtagggt

SEQ ID NO: 708 - DNA, 50 bp, Homo sapiens
aaactgaatgagagaaaattgtataaccatcctgctgttcctttagtgca

SEQ ID NO: 709 - DNA, 50 bp, Homo sapiens
tgacactggtcttgcagtacaactggaagccaaaacaaggtggaagatgt

SEQ ID NO: 710 - DNA, 50 bp, Homo sapiens
ggtcaagtatatttggacctattatcctcggcaagccaagatgcaaacat

SEQ ID NO: 711 - DNA, 50 bp, Homo sapiens
agttcacaatatggttcaaatgtaacagtgcagaattgaatatggaggca

SEQ ID NO: 712 - DNA, 50 bp, Homo sapiens
ttgcatctttccaggagagcctcacattcttcttccaggttgtatcaccc

SEQ ID NO: 713 - DNA, 50 bp, Homo sapiens
gtgagtcaggagcaggagcgtgcggaccaaaaatcctcagcccttacgac

SEQ ID NO: 714 - DNA, 50 bp, Homo sapiens
tcaccttatgcaatgtgaattatcactacagaactccatcttactccaga

SEQ ID NO: 715 - DNA, 50 bp, Homo sapiens
tttgatgtaatataacctaacgttgtgctggtacctgttttaccatgtgt

SEQ ID NO: 716 - DNA, 50 bp, Homo sapiens
ctccatccctggccccctccctggatgacattaaagaagggttgagctgg

SEQ ID NO: 717 - DNA, 50 bp, Homo sapiens; identical to SEQ ID NO: 716

SEQ ID NO: 718 - DNA, 50 bp, Homo sapiens
ggcttagctgccagtctcccatttgtgacctatgccatccatctataatg

SEQ ID NO: 719 - DNA, 50 bp, Homo sapiens
ggccccaatgccaactcttaagtcttttgtaattctggctttctctaata

SEQ ID NO: 720 - DNA, 50 bp, Homo sapiens
tgtcaggtttgggtcttgggttcaagtgtatatattcctgtaagtttctt

SEQ ID NO: 721 - DNA, 50 bp, Homo sapiens; identical to SEQ ID NO: 75

SEQ ID NO: 722 - DNA, 50 bp, Homo sapiens
ttgacattctgcgaaagcaacaagcaaactgaagaccaactcctatgaga

SEQ ID NO: 723 - DNA, 50 bp, Homo sapiens
cgcctcttcaggttcttaagggattctccgttttggttccattttgtaca

SEQ ID NO: 724 - DNA, 50 bp, Homo sapiens
ccttgttggacagggggacaggctgcctactggaatgtaaatatgtgata

SEQ ID NO: 725 - DNA, 50 bp, Homo sapiens
tttctgaatgcctacctggcggtgtataccaggcagtgtcccagtttaaa

SEQ ID NO: 726 - DNA, 50 bp, Homo sapiens
tgtgcaaggggagcacatattggatgtatatgttaccatatgttaggaaa

SEQ ID NO: 727 - DNA, 50 bp, Homo sapiens
tcaagtgaacatctcttgccatcacctagctgcctgcacctgcccttcag

SEQ ID NO: 728 - DNA, 50 bp, Homo sapiens
ccgaggagaagcgcgagggctacgagcgtctcctgaagatgcaaaaccag

SEQ ID NO: 729 - DNA, 50 bp, Homo sapiens
gcagctgtttgaagtttgtatattttccgtactgcagagcttacacaaaa

SEQ ID NO: 730 - DNA, 50 bp, Homo sapiens
gcctgtgaaatagtactgcacttacataaagtgagacattgtgaaaaggc

SEQ ID NO: 731 - DNA, 50 bp, Homo sapiens
gctctgattgtacaagaattacctgtgctagtcaagttgttgtttttcct

SEQ ID NO: 732 - DNA, 50 bp, Homo sapiens
ctgtcttttgtagctctggactggaggggtagatggggagtcaattaccc

SEQ ID NO: 733 - DNA, 50 bp, Homo sapiens
ggtacaaccttcaactatttcttccatgcggaccccctcctgccaaaaga

SEQ ID NO: 734 - DNA, 50 bp, Homo sapiens
gcaattctccctgcgtcatggatttcaaggtcttttaatcaccttcggtt

SEQ ID NO: 735 - DNA, 50 bp, Homo sapiens
ccttcgctttaacataggtctaatttatttgccgtgccattttccataca

SEQ ID NO: 736 - DNA, 50 bp, Homo sapiens
tggttggaagtgggtggggttatgaaattgtagatgtttttagaaaaact

SEQ ID NO: 737 - DNA, 50 bp, Homo sapiens
accttcctccaggaaaagccattcaagcctgattatttttctaagtaact

SEQ ID NO: 738 - DNA, 50 bp, Homo sapiens
ctgtatagctttccccacctcccacaaaatcacccagttaatgtgtgtgt

SEQ ID NO: 739 - DNA, 50 bp, Homo sapiens
ggggtacctgtgttgagttgataaacatttccatcttcattaaaactgct

SEQ ID NO: 740 - DNA, 50 bp, Homo sapiens
tgtccacctttgcagcctgtttctgtcatgtagtttcaacaagtgctacc

SEQ ID NO: 741 - DNA, 50 bp, Homo sapiens
atgctacctcaaagtgctaccgataaacctttctaattgtaagtgccctt

SEQ ID NO: 742 - DNA, 50 bp, Homo sapiens
agcacccattccgaccatagtataatcatatcaaagggtgagaatcattt

SEQ ID NO: 743 - DNA, 50 bp, Homo sapiens
tgtggtttaagctgtactgaactaaatctgtggaatgcattgtgaactgt

SEQ ID NO: 744 - DNA, 50 bp, Homo sapiens
attacgaagatgaaccagtaaacgaggacatggagtgactatcggggcgg

SEQ ID NO: 745 - DNA, 50 bp, Homo sapiens
tcctccagctgacagaaaaatccaggatgagatcagaaggatactggtgt

SEQ ID NO: 746 - DNA, 50 bp, Homo sapiens
tttacacgccctgaagcagtcttctttgctagttgaattatgtggtgtgt

SEQ ID NO: 747 - DNA, 50 bp, Homo sapiens
gttcacggaaaagccagaacctgctgttttcagggtgggtgatgtaaata

SEQ ID NO: 748 - DNA, 50 bp, Homo sapiens
agtgctcttgctttggataactgtaaagggacccatgctgatagactgga

SEQ ID NO: 749 - DNA, 50 bp, Homo sapiens
tgccccagttgtcagtcagagccgttggtgtttttcattgtttaaaatgt

SEQ ID NO: 750 - DNA, 50 bp, Homo sapiens
aaaccaatggacaaacttcttgcttcaaggaacaaactcttaggttggca

SEQ ID NO: 751 - DNA, 50 bp, Homo sapiens
aaacatcatgagagtggaggcctgccacccagaaaggcacatactagtgc

SEQ ID NO: 752 - DNA, 50 bp, Homo sapiens
agtggattaacccctgcttctcttcttgttccctgttatcattcctcccc

SEQ ID NO: 753 - DNA, 50 bp, Homo sapiens
gtctgcttattcgtgtctcttactaggttcaatttcttggaggccgtgat

SEQ ID NO: 754 - DNA, 50 bp, Homo sapiens
tggcctgactgacatgcagttccataaatgcagatgtttgtctcattacc

SEQ ID NO: 755 - DNA, 50 bp, Homo sapiens
gccagacttgaaagagggctccagaaaaagtagatgcgtatctgtacaaa

SEQ ID NO: 756 - DNA, 50 bp, Homo sapiens
cgtcttaatgttcaccgtccacagctttggaataaaccatcctgggaagt

SEQ ID NO: 757 - DNA, 50 bp, Homo sapiens
ttaatgttcaccgtccacagctttggaataaaccatcctgggaagttgct

SEQ ID NO: 758 - DNA, 50 bp, Homo sapiens
tctagcccagcattgatctagaagcagaggaatcccagcgccttttaaaa

SEQ ID NO: 759 - DNA, 50 bp, Homo sapiens
ttgctcagcatgccagcctttaagattgaattagattgtgttgttgtggt

SEQ ID NO: 760 - DNA, 50 bp, Homo sapiens
aaaaggtatagaaatgctggttggaatgcttatttgaaaaagactggcca

SEQ ID NO: 761 - DNA, 50 bp, Homo sapiens
ctgcttcacgcctgtgtctccgcagcacttcatcgacctcttcaagtttt

SEQ ID NO: 762 - DNA, 50 bp, Homo sapiens
agagcagcttgtgtatgtaaacgcttcagtgaacttgctaatgatccaat

SEQ ID NO: 763 - DNA, 50 bp, Homo sapiens
tcaaacctactaatccagcgacaatttgaatcggttttgtaggtagagga

SEQ ID NO: 764 - DNA, 50 bp, Homo sapiens
tcaacctccgtcatgttttagaaaccttttatcttttccttcctcatgct

SEQ ID NO: 765 - DNA, 50 bp, Homo sapiens
tttccatctgtgtcccagattgtgaccctagactttcaattgacaagtaa

SEQ ID NO: 766 - DNA, 50 bp, Homo sapiens
catgtcgttagatggaacatggaagccattgtctaatcaactctatcatt

SEQ ID NO: 767 - DNA, 50 bp, Homo sapiens
atgtaatcctgtaggttggtacttcccccaaactgattataggtaacagt

SEQ ID NO: 768 - DNA, 50 bp, Homo sapiens
tgaatgatcagaactgacatttaattcatgtttgtctcgccatgcttctt

SEQ ID NO: 769 - DNA, 50 bp, Homo sapiens
tttgcacattttacatatgctatgtggttgcctttgggttttctgtacag

SEQ ID NO: 770 - DNA, 50 bp, Homo sapiens
tggtcatgttccaggtgctagtacatcattcatgatcaccttaatgctca

SEQ ID NO: 771 - DNA, 50 bp, Homo sapiens
agcataaagagttgtggatcagtagccattttagttactgggggtggggg

SEQ ID NO: 772 - DNA, 50 bp, Homo sapiens
tcaacactttgctttatttgacacaaccagactttctcagttcctgttct

SEQ ID NO: 773 - DNA, 50 bp, Homo sapiens
atgaagaaaatcattgagactgttgcagaaggagggggagaacttggagt

SEQ ID NO: 774 - DNA, 50 bp, Homo sapiens
actgaaagacttttgcttaaagtggcattattgactgctgatgtgatgct

SEQ ID NO: 775 - DNA, 50 bp, Homo sapiens
ttggttggtaactctgtaattcctaactatcactggtttggttctggact

SEQ ID NO: 776 - DNA, 50 bp, Homo sapiens
ccaccatatatactagctgttaatcctatggaatggggtattgggagtgc

SEQ ID NO: 777 - DNA, 50 bp, Homo sapiens
agaggaatctgaaagtgcagggtgttggttaaagttgtacctcccaagta

SEQ ID NO: 778 - DNA, 50 bp, Homo sapiens
tttttctccatcctgtttctagcacaaaaatttgcctgctgtgttacaaa

SEQ ID NO: 779 - DNA, 50 bp, Homo sapiens
cagattgatttgaaaggtgtgcagcctgatttaaaaccaaaccctgaacc

SEQ ID NO: 780 - DNA, 50 bp, Homo sapiens
gcaactaataagccaaggaatcgacatatattaggtgcgtgtactgtttc

SEQ ID NO: 781 - DNA, 50 bp, Homo sapiens
tgtccagtgataaatgtgattgatcttgccttttgtacatggaggtcacc

SEQ ID NO: 782 - DNA, 50 bp, Homo sapiens; identical to SEQ ID NO: 758

SEQ ID NO: 783 - DNA, 50 bp, Homo sapiens
agggaacagtgtggagatgtttttgtcttgtccaaataaaagattcacca

SEQ ID NO: 784 - DNA, 50 bp, Homo sapiens
acccattggtatacacagaatattcctgtgcccacacttaatgtcaatct

SEQ ID NO: 785 - DNA, 50 bp, Homo sapiens
ttgatgataccaccagtaaaaataggatgtttaccccaaaacaagtgtca

SEQ ID NO: 786 - DNA, 50 bp, Homo sapiens
tttcaaccgaaagggcagatccaatagaagacccgctccttaaataaaca

SEQ ID NO: 787 - DNA, 50 bp, Homo sapiens
acagaggcaaagttaagcttgatgatggttaaaatcggtttgatagcacc

SEQ ID NO: 788 - DNA, 50 bp, Homo sapiens
tggttgatttccctcattgtgtaaacattgacaggtatgtgacaaatggg

SEQ ID NO: 789 - DNA, 50 bp, Homo sapiens
cacaaactagattctggacaccagtgtgcggaaatgcttctgctacattt

SEQ ID NO: 790 - DNA, 50 bp, Homo sapiens
ggccctctttcctgtctgtgtaaattgttccgtgaagccgcgctctgttt

SEQ ID NO: 791 - DNA, 50 bp, Homo sapiens
cactgtcctttctccaggccctcagatggcacattagggtgggcgtgctg

SEQ ID NO: 792 - DNA, 50 bp, Homo sapiens
aggagctatgattagacttctgttagacttcctcactctatcacccacat

SEQ ID NO: 793 - DNA, 50 bp, Homo sapiens
acccactttctccttggtaaagcgtttacttaacaaaataatacccgaga

SEQ ID NO: 794 - DNA, 50 bp, Homo sapiens
gtcacacatgacacaagatgtacataatatcatgctcacgcctggagtgt

SEQ ID NO: 795 - DNA, 50 bp, Homo sapiens
atgtgcatgtgaatggcctagagaacctatttttgtgtctaaagtttaca

SEQ ID NO: 796 - DNA, 50 bp, Homo sapiens
agatcctgtcctcctttagcctcactaatcaagttgggtcctatcttccc

SEQ ID NO: 797 - DNA, 50 bp, Homo sapiens
agttgttagttgccctgctacctagtttgttagtgcatttgagcacacat

SEQ ID NO: 798 - DNA, 50 bp, Homo sapiens
aatcctttaactctgcggatagcatttggtaggtagtgattaactgtgaa

SEQ ID NO: 799 - DNA, 50 bp, Homo sapiens
ggaggaggagcttatttcttggtgtacttgaatcagaaggtccctgcaag

SEQ ID NO: 800 - DNA, 50 bp, Homo sapiens; identical to SEQ ID NO: 799

SEQ ID NO: 801 - DNA, 50 bp, Homo sapiens
aagtggaagtgggtgaattctactttttatgttggagtggaccaatgtct

SEQ ID NO: 802 - DNA, 50 bp, Homo sapiens
tgggattcattggcccataggtacattggaaaatgtatatctctccagct

SEQ ID NO: 803 - DNA, 50 bp, Homo sapiens
gggacccccaggaggctgaggatgggagacagagaccagactgtgacttg

SEQ ID NO: 804 - DNA, 50 bp, Homo sapiens
tgtttgtagcacacttgagtttgtgtattccattgacatcaaatgtgaca

SEQ ID NO: 805 - DNA, 50 bp, Homo sapiens
cgatctgtgtttgctctgacgaatggaatttatcctcacaaattggtgtt

SEQ ID NO: 806 - DNA, 50 bp, Homo sapiens
ccaggagcgtggttttctgattgtgatctgaggttctgccccaactgcac

SEQ ID NO: 807 - DNA, 50 bp, Homo sapiens
acattacctaatattctcactagctatgttctccaatccacactgccttt

SEQ ID NO: 808 - DNA, 50 bp, Homo sapiens
agacagccctgccaaagccataccaaagacactcaaagacagccaataaa

SEQ ID NO: 809 - DNA, 50 bp, Homo sapiens
agagatagcacagatggaccaaaggttatgcacaggtgggagtcttttgt

SEQ ID NO: 810 - DNA, 50 bp, Homo sapiens; identical to SEQ ID NO: 809

SEQ ID NO: 811 - DNA, 50 bp, Homo sapiens
gcctttcttcctctcccaacataacaatcgtggtaacagaatgcgactgc

SEQ ID NO: 812 - DNA, 50 bp, Homo sapiens
accgtgtaaagtggggatggggtaaaagtggttaacgtactgttggatca

SEQ ID NO: 813 - DNA, 50 bp, Homo sapiens
gcccagtgcttaaaaacgccttcttgcatgaggggattgaactatacaat

SEQ ID NO: 814 - DNA, 50 bp, Homo sapiens
gcgggaaggcatgtaaccacctaaaccatctccgagaacatcagaggatc

SEQ ID NO: 815 - DNA, 50 bp, Homo sapiens
tgtcaggctggcttggttaggttttactggggcagaggatagggaatctc

SEQ ID NO: 816 - DNA, 50 bp, Homo sapiens
ggtggattccaaatgaacccctgcgttagttacaaaggaaaccaatgcca

SEQ ID NO: 817 - DNA, 50 bp, Homo sapiens
atttatcgtaaacatccacgagtgctgttgcactaccatctatttgttgt

SEQ ID NO: 818 - DNA, 50 bp, Homo sapiens
tgggggttgtaaattggcatggaaatttaaagcaggttcttgttggtgca

SEQ ID NO: 819 - DNA, 50 bp, Homo sapiens
gataggggcggcccggagccagccaggcagttttattgaaatctttttaa

SEQ ID NO: 820 - DNA, 50 bp, Homo sapiens
catttgtaccctaggcccacgaacccacgagaatgtcctctgacttccag

SEQ ID NO: 821 - DNA, 50 bp, Homo sapiens
agtgggattttatgccagttgttaaaatgagcattgatgtacccattttt

SEQ ID NO: 822 - DNA, 50 bp, Homo sapiens
ctttcctttgctccctcccatgtttctggtggactaaattgtgtatctgg

SEQ ID NO: 823 - DNA, 50 bp, Homo sapiens
agttttctagattgtcacatgctttgtgactaatgcaagaaagcaagtcc

SEQ ID NO: 824 - DNA, 50 bp, Homo sapiens
gaaacactttcaggaccttccttcctcttgcagttgttctttaatctcct

SEQ ID NO: 825 - DNA, 50 bp, Homo sapiens
ctcgaggggccaattacaggagcacaggaaggttctgattacacacctct

SEQ ID NO: 826 - DNA, 50 bp, Homo sapiens
ttgagttaagttgcatttctttgggctatgaaggagtcctcttaagtttg

SEQ ID NO: 827 - DNA, 50 bp, Homo sapiens
agggattgtttctggaccagtttgtctaagtcctggctcttattggttca

SEQ ID NO: 828 - DNA, 50 bp, Homo sapiens
tgaactgctgctacatccagacactgtgcaaataaattatttctgctacc

SEQ ID NO: 829 - DNA, 50 bp, Homo sapiens
actatgcagtttttcttgaaggaactaaaagcaactagctccctaatggt

SEQ ID NO: 830 - DNA, 50 bp, Homo sapiens
gtctttccagcatccactctcccttgtcctcctgggggcatatctcagtc

SEQ ID NO: 831 - DNA, 50 bp, Homo sapiens
gcagtaggtaggctcacttctctttcccttcaaaatgcttttcataggct

SEQ ID NO: 832 - DNA, 50 bp, Homo sapiens
tctgctgttgggctggtgtgtggacagaaggaatggaaagccaaattaat

SEQ ID NO: 833 - DNA, 50 bp, Homo sapiens
ccacttggaataggaatatcacccctatcttggaagaccaggtggaggct

SEQ ID NO: 834 - DNA, 50 bp, Homo sapiens
gccctatggcgttgttaaacacgagcgtatgctagtaagtatcattcata

SEQ ID NO: 835 - DNA, 50 bp, Homo sapiens
gtgggtgcatggggctgtggagtgggtgtcagtatggatgtgtctgaatg

SEQ ID NO: 836 - DNA, 50 bp, Homo sapiens
cattcgtctgtatgcccagtcccatccgtgtcctgctgtaactacataga

SEQ ID NO: 837 - DNA, 50 bp, Homo sapiens
tgtctgcttcttccattttctcgtctctctcccctcttcccccattatcc

SEQ ID NO: 838 - DNA, 50 bp, Homo sapiens; identical to SEQ ID NO: 580

SEQ ID NO: 839 - DNA, 50 bp, Homo sapiens
ccagattagggtggctgtccatccctggatagctatttgcacgaatcatg

SEQ ID NO: 840 - DNA, 50 bp, Homo sapiens
cggagctctggctctgctgtaggaagcccggtacgtccttcatgacagca

SEQ ID NO: 841 - DNA, 50 bp, Homo sapiens
gcactgaatatcgaacaagcactcaaattgaagtatcagtcatgttttgt

SEQ ID NO: 842 - DNA, 50 bp, Homo sapiens
agctcgaggtgtcctgcacttttcttataaggctactgaagttacatgtt

SEQ ID NO: 843 - DNA, 50 bp, Homo sapiens
tgccattggaatgtttctacacgatcctattaagaataatgtgatgccct

SEQ ID NO: 844 - DNA, 50 bp, Homo sapiens
ggataacaagtaaatgtctgaaagcatgaggggctttatttgcctttacc

SEQ ID NO: 845 - DNA, 50 bp, Homo sapiens; identical to SEQ ID NO: 28

SEQ ID NO: 846 - DNA, 50 bp, Homo sapiens
aaaactcatctcagaagaggatctgaatggggccgcacatcaccatcatc

SEQ ID NO: 847 - DNA, 50 bp, Homo sapiens
aaacccctttaaatgagggccagtattatctctgctttcagaagtagaca

SEQ ID NO: 848 - DNA, 50 bp, Homo sapiens
gacctgactccactcttaaacctgggtcttctccttggcggtgctgtcag

SEQ ID NO: 849 - DNA, 50 bp, Homo sapiens
cttttatagcagtttatggggagcacttgaaagagcgtgtgtacatgtat

SEQ ID NO: 850 - DNA, 50 bp, Homo sapiens
agatcctgaaagtagctgcctgtgacccagtgaagccatatcaaaagtgg

SEQ ID NO: 851 - DNA, 50 bp, Homo sapiens
tactgctaagtgcttggttggggtggtgagatgatgattagatcaggggt

SEQ ID NO: 852 - DNA, 50 bp, Homo sapiens
ttgtacccagagactatgatttatattgattgcacttgcctgccatgatt

SEQ ID NO: 853 - DNA, 50 bp, Homo sapiens
tttcagatgcttctgggagacaccaaagggtgaagctatttatctgtagt

SEQ ID NO: 854 - DNA, 50 bp, Homo sapiens
ttgtggtaatatgatgtgcctttccttgcctaaatcccttcctggtgtgt

SEQ ID NO: 855 - DNA, 50 bp, Homo sapiens
cacaaggtgcgcggttaccgctacttggaggaggacaactcggacgagag

SEQ ID NO: 856 - DNA, 50 bp, Homo sapiens
tagactcacgaacaaatccacctgagatcagcagagccaccctagatcag

SEQ ID NO: 857 - DNA, 50 bp, Homo sapiens
cctcagaggcttactctaacccatcccagaataaatggagacttcatgtg

SEQ ID NO: 858 - DNA, 50 bp, Homo sapiens
aggctgttgatgcttattctctgtaactaagaattttaccttttggggga

SEQ ID NO: 859 - DNA, 50 bp, Homo sapiens
gtaaacgtatcctctgtattcagtaaacaggctgcctctccagggagggc

SEQ ID NO: 860 - DNA, 50 bp, Homo sapiens
aactaaccccctttccctgctagaaataacaattagatgccccaaagcga

SEQ ID NO: 861 - DNA, 50 bp, Homo sapiens
gcctcgacacatcctcatccccagcatgggacacctcaagatgaataata

SEQ ID NO: 862 - DNA, 48 bp, Homo sapiens
gcacagtcacattccctccttaggaatcttccccttccaccctttaca

SEQ ID NO: 863 - DNA, 50 bp, Homo sapiens
tttgaggttctttggttttgttagtaaaagccagttctgtggtgatgacc

SEQ ID NO: 864 - DNA, 50 bp, Homo sapiens
catctgaagtgtggagccttacccatttcatcacctacaacggaagtagt

SEQ ID NO: 865 - DNA, 50 bp, Homo sapiens
ttttggcagttgtctgcattaacctgttcatacacccattttgtcccttt

SEQ ID NO: 866 - DNA, 50 bp, Homo sapiens
tggtgtttatgtactactctatagaactcttggcttgcacttctacagct

SEQ ID NO: 867 - DNA, 50 bp, Homo sapiens; identical to SEQ ID NO: 131

SEQ ID NO: 868 - DNA, 50 bp, Homo sapiens
tggtctccttggaaatccgtctagttaacatttcaagggcaataccgtgt

SEQ ID NO: 869 - DNA, 50 bp, Homo sapiens
gtctaccaggcgaaaaccacagattctccttctagttagtatagcggact

SEQ ID NO: 870 - DNA, 50 bp, Homo sapiens
acttctcttgatgtagaaagagatgacgttgttaccctgagtgacagtca

SEQ ID NO: 871 - DNA, 50 bp, Homo sapiens
tgagctaagtgtcatgcatatttgtgaagaaacacccttgtttggtccct

SEQ ID NO: 872 - DNA, 50 bp, Homo sapiens
ctgagcaaggcagatgacctaatcacctcacgacagcaatacagcagtga

SEQ ID NO: 873 - DNA, 50 bp, Homo sapiens
tttgtactattgctagaccctcttctgtaatgggtaatgcgtttgattgt

SEQ ID NO: 874 - DNA, 50 bp, Homo sapiens
tgctatgctaatgtctagaaaggcatacgatgctactattatgctctgtt

SEQ ID NO: 875 - DNA, 50 bp, Homo sapiens
actgctctttctcaggcccaaggtaaaaaggtttttggtctcatgttgac

SEQ ID NO: 876 - DNA, 50 bp, Homo sapiens
tcaccagctgatgacacttccaaagagattagctcacctttctcctaggc

SEQ ID NO: 877 - DNA, 50 bp, Homo sapiens; identical to SEQ ID NO: 116

SEQ ID NO: 878 - DNA, 50 bp, Homo sapiens
tgcatgaagcactgtttttaaacccaagtaaagactgcttgaaacctgtt

SEQ ID NO: 879 - DNA, 50 bp, Homo sapiens
tgattttgcaacttaggatgtttttgagtcccatggttcattttgattgt

SEQ ID NO: 880 - DNA, 50 bp, Homo sapiens
tttgagcgatctctcacatgatggggttctttagtacatggtaacagcca

SEQ ID NO: 881 - DNA, 50 bp, Homo sapiens
cccggcctgggactcagcatttctgatatgccttaagaattcattctgtt

SEQ ID NO: 882 - DNA, 50 bp, Homo sapiens
agttttgctgaagactggccttattaatggacagctttcctaacaagaga

SEQ ID NO: 883 - DNA, 50 bp, Homo sapiens
gggtcaatagtttcccaatttcaggatatttcgatgtcagaaataacgca

SEQ ID NO: 884 - DNA, 50 bp, Homo sapiens
tgagagctgaaatgagaccatttactttgtttaaaatgctgtactgtgca

SEQ ID NO: 885 - DNA, 50 bp, Homo sapiens
ttgagctaagaccttaggaaattcactttctgcatgataaaatgacccaa

SEQ ID NO: 886 - DNA, 50 bp, Homo sapiens
tgtcattgtacactttatttccctcacactgtgttatgctctgatgtgct

SEQ ID NO: 887 - DNA, 50 bp, Homo sapiens
ggtctctttgactaatcaccaaaaagcaaccaacttagccagttttattt

SEQ ID NO: 888 - DNA, 50 bp, Homo sapiens
aggttcttcctgtacatacgtgtatatatgtgaacagtgagatggccgtt

SEQ ID NO: 889 - DNA, 50 bp, Homo sapiens
acttggatgctgccgctactgaatgtttacaaattgcttgcctgctaaag

SEQ ID NO: 890 - DNA, 50 bp, Homo sapiens
gggaggcgtggctgagaccaactggtttgcctataatttattaactattt

SEQ ID NO: 891 - DNA, 50 bp, Homo sapiens
tctcccagaatgtacttatcttacctcggcatgtactgtagtcactcagt

SEQ ID NO: 892 - DNA, 50 bp, Homo sapiens
tgtgcactgttgtaaaccattcagaattttcctgctaggcccttgatgct

SEQ ID NO: 893 - DNA, 50 bp, Homo sapiens
catcggccagacagagttgaatgcaagcaatccagaagaagtgttacagc

SEQ ID NO: 894 - DNA, 50 bp, Homo sapiens
tgctctagccatcaggttctttcaaatgcatctttacactcttgcacaaa

SEQ ID NO: 895 - DNA, 50 bp, Homo sapiens
tgagcatgaaatgggatcctgcatcacttgttttaactatttattttgcc

SEQ ID NO: 896 - DNA, 50 bp, Homo sapiens
tttgcggctagttggctattcaagaaacctcgcccctctgaatgtcatac

SEQ ID NO: 897 - DNA, 50 bp, Homo sapiens
gtttacgtggaagaaacgctaagggtttgctcccaggaaaggagaggaag

SEQ ID NO: 898 - DNA, 50 bp, Homo sapiens
tgctcaaatcaggacttaaatcataggcaccacatttttcatgtcagact

SEQ ID NO: 899 - DNA, 50 bp, Homo sapiens
tgaaattctacccatcttgagggaggaccgttcctcagttaaggacttgt

SEQ ID NO: 900 - DNA, 50 bp, Homo sapiens
atgagtgtgtcggaatcccgtgcttaaaatacgctcttaaattattttct

SEQ ID NO: 901 - DNA, 50 bp, Homo sapiens
aaatcagaactgaggtagcttagagatgtagcgatgtaagtgtcgatgtt

SEQ ID NO: 902 - DNA, 50 bp, Homo sapiens
aggctttagcaaagatggatatattggtgactgagacagaagaactggca

SEQ ID NO: 903 - DNA, 50 bp, Homo sapiens
agtgggcctaactcatgtgagcttgataactgatgaactcattgggagca

SEQ ID NO: 904 - DNA, 50 bp, Homo sapiens
aacactaacctctcccctcctggctcaagaattactccgaagtcagtctg

SEQ ID NO: 905 - DNA, 50 bp, Homo sapiens
tctgtcaggaaatgtaactttggttttatttttggcttattccaaggggt

SEQ ID NO: 906 - DNA, 50 bp, Homo sapiens
aaattgtgccggacttacctttcattgaacatgctgccataacttagatt

SEQ ID NO: 907 - DNA, 50 bp, Homo sapiens
tggcagggagctgggacctggagagacaactcctgtaaataaaacacttt

SEQ ID NO: 908 - DNA, 50 bp, Homo sapiens
agggagataatggagtccactttaatttggaattctgtgtgagctatgat

SEQ ID NO: 909 - DNA, 50 bp, Homo sapiens
agatcagtgatactggtgttagtgttgtaatcaggttaaacccacttcca

SEQ ID NO: 910 - DNA, 50 bp, Homo sapiens
ccatttgacagtaaaggctcttggcttctgttggaggcatgggaaattgt

SEQ ID NO: 911 - DNA, 50 bp, Homo sapiens
tttaacagcctgtcctcccggcatcaggagtcattgaacaatcatggatt

SEQ ID NO: 912 - DNA, 50 bp, Homo sapiens
aatacttattgtttggcaggtcatccacacacttctgcccccactgcatt

SEQ ID NO: 913 - DNA, 50 bp, Homo sapiens
ttatcagatgggatactggggactataaacaatggaaataaagccactgt

SEQ ID NO: 914 - DNA, 50 bp, Homo sapiens
ccctgtgcctttcctttgagagtgaaggtgggtggagttgaccagagaaa

SEQ ID NO: 915 - DNA, 50 bp, Homo sapiens
tgtgtgcgtagaatattacgtatgcatgttcatgtctaaagaatggctgt

SEQ ID NO: 916 - DNA, 50 bp, Homo sapiens
tctacatgtgactggctttcttgccctcgtctcttgaatgtttagactct

SEQ ID NO: 917 - DNA, 50 bp, Homo sapiens
tggtacccaaactcaccatttggtcctctttaatctttgagggtttcaat

SEQ ID NO: 918 - DNA, 50 bp, Homo sapiens
ttccatttattcatgtacattggccagttcctggtccttgtctgacttct

SEQ ID NO: 919 - DNA, 50 bp, Homo sapiens
aaccatctggagtcagtacagatcatcaatccttccacatatacaagttc

SEQ ID NO: 920 - DNA, 50 bp, Homo sapiens
ggccacctgctgactatttgtggtttaaaataaaaggtttacttgtctgc

SEQ ID NO: 921 - DNA, 50 bp, Homo sapiens
tctttgtaaagcacgatgatacaaatctggtgccagtgttatattttgca

SEQ ID NO: 922 - DNA, 50 bp, Homo sapiens
catggatatcatgtatccttcctggtgctcacacacctgtcaccttgtaa

SEQ ID NO: 923 - DNA, 50 bp, Homo sapiens
ataaggtgcataaaacccttaaattcatctagtagctgttcccccgaaca

SEQ ID NO: 924 - DNA, 50 bp, Homo sapiens
tggaccggagtctgctgagtttataaggttccaaaaatatggtaaaatct

SEQ ID NO: 925 - DNA, 50 bp, Homo sapiens
actcgaccttggtaaacggaaatgttgggggtgaagagaaacaatcacta

SEQ ID NO: 926 - DNA, 50 bp, Homo sapiens
ttcaaggttctgcgaaattaattgggcaggttaattgtgtacctgaaact

SEQ ID NO: 927 - DNA, 50 bp, Homo sapiens
tccccaggatggggcctcatacaacccttcatctgcactcaacatttaat

SEQ ID NO: 928 - DNA, 50 bp, Homo sapiens
ttttagacatggagtgcaggtggacactgtgtgaactgtttttggtcagt

SEQ ID NO: 929 - DNA, 50 bp, Homo sapiens
caagaaacttggtctgcagtctggaagcttgtctgctctatagaaatgaa

SEQ ID NO: 930 - DNA, 50 bp, Homo sapiens; identical to SEQ ID NO: 929

SEQ ID NO: 931 - DNA, 50 bp, Homo sapiens; identical to SEQ ID NO: 602

SEQ ID NO: 932 - DNA, 50 bp, Homo sapiens
ccccttcaactgagggtcattttaccagagtcaataaaggccaacccttc

SEQ ID NO: 933 - DNA, 50 bp, Homo sapiens
attctgagggtgactgaggctacagctgctatcacatgccgaactttctt

SEQ ID NO: 934 - DNA, 50 bp, Homo sapiens
tggtatcaggagttgggatttctcagcactgctaatgaagatcccctctt

SEQ ID NO: 935 - DNA, 50 bp, Homo sapiens
cgcagagaggagaaaaggagacagcaagacgccaataaagaaacacaact

SEQ ID NO: 936 - DNA, 50 bp, Homo sapiens
cccgcacgggcagctgaaggccgctgttttctaatatttgtattctaatt

SEQ ID NO: 937 - DNA, 50 bp, Homo sapiens
cccctgggagatgtagcaaattgagtgtgggttttggagtctgagcctca

SEQ ID NO: 938 - DNA, 50 bp, Homo sapiens
gcagagggagggttgccatgaaggaacttgggattttcaatggaataaat

SEQ ID NO: 939 - DNA, 50 bp, Homo sapiens
cctttcacgtctggacgaattaccaaatgccatgaattgccactgtgtgt

SEQ ID NO: 940 - DNA, 50 bp, Homo sapiens
aggaagatggcgctgttatcagcggggaaatgtactatttaagatcagct

SEQ ID NO: 941 - DNA, 50 bp, Homo sapiens
atccaagtctgaaactctgcgctctagtactgctgttaagatacacaact

SEQ ID NO: 942 - DNA, 50 bp, Homo sapiens
tggatagccatttctgctcaaccacacattctctaagaaacagcttgaaa

SEQ ID NO: 943 - DNA, 50 bp, Homo sapiens
tgttgtatgtggatggggaagttttgtttctcctcttagcatttgtttct

SEQ ID NO: 944 - DNA, 50 bp, Homo sapiens
tctgaatgatcctactcctttggagtaaaactagtgcttaccagtttcca

SEQ ID NO: 945 - DNA, 50 bp, Homo sapiens
tccttttgtagccactttgagtctgcagttgtcagtaagcctttttaaag

SEQ ID NO: 946 - DNA, 50 bp, Homo sapiens
gggggaaattaccagtagaatgccttggtctgaatatttgatagaaccaa

SEQ ID NO: 947 - DNA, 50 bp, Homo sapiens
ctggtactttacagttttgcaccaactctgccaagccactggatcttaca

SEQ ID NO: 948 - DNA, 50 bp, Homo sapiens
atccagtcactcatcaagtgtaatctgtctcctaaatatctctggaacct

SEQ ID NO: 949 - DNA, 50 bp, Homo sapiens
agcttttggggtcagatctctggaacatcatgtgatgaagctgacatttt

SEQ ID NO: 950 - DNA, 50 bp, Homo sapiens
agcagttaggcttgactttgaggagaggctgtgatgtttatgatccctga

SEQ ID NO: 951 - DNA, 50 bp, Homo sapiens
gctgtccacagaaaacgcccttaagtagccctaccttactccttagagct

SEQ ID NO: 952 - DNA, 50 bp, Homo sapiens
catgggtattaatagtctttgctgctggtaatactgaaagaacctgcttt

SEQ ID NO: 953 - DNA, 50 bp, Homo sapiens
aggatttgatttcttgaaaccctctaggtctctagaacactgaggacagt

SEQ ID NO: 954 - DNA, 50 bp, Homo sapiens
ggactcaggagctaatactgtctacagtggagcttggtgcaattagaagc

SEQ ID NO: 955 - DNA, 50 bp, Homo sapiens
accaggaggacagagtttgctttcatattttccctgtaagtaagagggct

SEQ ID NO: 956 - DNA, 50 bp, Homo sapiens
ccatgaagaagcaagacgaaaacacacaggagggaaaatcctgggattct

SEQ ID NO: 957 - DNA, 50 bp, Homo sapiens
ttggaatttgtgttgcatgtaaggcaatctttcctgttgtaaatcttcct

SEQ ID NO: 958 - DNA, 50 bp, Homo sapiens
aggaaactgagtagactcctgtgtaaccctgtttggaactttgccttctt

SEQ ID NO: 959 - DNA, 50 bp, Homo sapiens
tttacaaggcagaatggggtgtaacagttgaattaaactagcaatcacgt

SEQ ID NO: 960 - DNA, 50 bp, Homo sapiens
tagtaggaatgaagtggaagtccaggcttggattgcctaactacactgct

SEQ ID NO: 961 - DNA, 50 bp, Homo sapiens
agtgtttagtctcatgttgggaacacatgaatgtgatgaacatagtgaat

SEQ ID NO: 962 - DNA, 50 bp, Homo sapiens
accctttgagagttccacaagtggtagtagagtggtttaacgtctttcct

SEQ ID NO: 963 - DNA, 50 bp, Homo sapiens
ttgccccttttctgtaagtctcttgggatcctgtgtagaagctgttctca

SEQ ID NO: 964 - DNA, 50 bp, Homo sapiens
actcatcaattgaaaagtcctccaaaaagagaactattgggaaaccatgg

SEQ ID NO: 965 - DNA, 50 bp, Homo sapiens; identical to SEQ ID NO: 21

SEQ ID NO: 966 - DNA, 50 bp, Homo sapiens
tcagacctggttgattttgtactttggaactgtaccttggatggttttgt

SEQ ID NO: 967 - DNA, 50 bp, Homo sapiens
gtatctcatggcctcttgatgtggaaagaagttgacagagggttgcaggg

SEQ ID NO: 968 - DNA, 50 bp, Homo sapiens
agttcagtgagaagaaaccagaacacttgttcctagtgttgtgttgtttt

SEQ ID NO: 969 - DNA, 50 bp, Homo sapiens
gcagatggctatgtgctagagggcaaagagttggagttctatcttaggaa

SEQ ID NO: 970 - DNA, 50 bp, Homo sapiens
ttggtgtcaatgatctggtgacaataggattacattggagccaattgaat

SEQ ID NO: 971 - DNA, 50 bp, Homo sapiens
aactagaagatgtacttcgacagcatccattttacttcaaggcagcaaga

SEQ ID NO: 972 - DNA, 50 bp, Homo sapiens
atacacttttccaaatttgtcccaacagccctgtaagccagctttcttct

SEQ ID NO: 973 - DNA, 50 bp, Homo sapiens
gcattttcttcacttgcaggcaaacttggctctcaataaacttttaccac

SEQ ID NO: 974 - DNA, 50 bp, Homo sapiens; identical to SEQ ID NO: 129

SEQ ID NO: 975 - DNA, 50 bp, Homo sapiens
agccaaatgtgtcatacatcaaatcttcagcagcttttgcataatccagg

SEQ ID NO: 976 - DNA, 50 bp, Homo sapiens
tcctcaaaggggaaaactatgaaggggaagaagacaaacctaagatacca

SEQ ID NO: 977 - DNA, 50 bp, Homo sapiens
agatggactggagctttttctttgtgaatagaaactggatgccacagtga

SEQ ID NO: 978 - DNA, 50 bp, Homo sapiens
agttgtcagaagactcctgggtgtacagagcaaatcaagctgcatcagta

SEQ ID NO: 979 - DNA, 50 bp, Homo sapiens
agtggcttcatagctactgacaaatgtctgaactattgtcgtgcccttca

SEQ ID NO: 980 - DNA, 50 bp, Homo sapiens
gcctgtacaaacattcaagttagttggcagtctataaatgtgagttgggt

SEQ ID NO: 981 - DNA, 50 bp, Homo sapiens
aaggaaggtaaagttaggggactagaagactctaaattggcttctacaga

SEQ ID NO: 982 - DNA, 50 bp, Homo sapiens
agaactaattgcccatgtttaattatagcagacacgccattctaacaggt

SEQ ID NO: 983 - DNA, 50 bp, Homo sapiens
aacttggtattgttgtagtttatgtagtaagtgacttggcacccatcaga

SEQ ID NO: 984 - DNA, 50 bp, Homo sapiens
agtttaacttttcctcacccctgtatagaaaatgccttgcctctcaagag

SEQ ID NO: 985 - DNA, 50 bp, Homo sapiens
gtcttgggctggatgggttatagagctgagcggctgtgatggttctgttt

SEQ ID NO: 986 - DNA, 50 bp, Homo sapiens
gacacatctagaatgtttttctttcaccgtacctccaaaagaggcaattt

SEQ ID NO: 987 - DNA, 50 bp, Homo sapiens
accagggatgctctctaacgtaatcaagggaaggttcagtaagacaaagt

SEQ ID NO: 988 - DNA, 50 bp, Homo sapiens
acacagttcagtttttgagggaactagttttgtcataatactacacccct

SEQ ID NO: 989 - DNA, 50 bp, Homo sapiens
tgcagtgggaattcttgagtgaggtcttacctcttctttaaacctcttca

SEQ ID NO: 990 - DNA, 50 bp, Homo sapiens
aaggcagaatagaatgctgagattggttaagtttgcaatgaccatcttga

SEQ ID NO: 991 - DNA, 50 bp, Homo sapiens
tgccctaatcttgagttgaggaaatatatgcacaggagtcaaagagatgt

SEQ ID NO: 992 - DNA, 50 bp, Homo sapiens
gctagattgtgaagtacatgggatttcatgagccagaggaggcatttgga

SEQ ID NO: 993 - DNA, 50 bp, Homo sapiens
gcctcaaagaaaacccagagtgccctgttctaaaacgtagttctgaatcc

SEQ ID NO: 994 - DNA, 50 bp, Homo sapiens
aatcccagggcttggttaagtgctgtgtgataacttgtttggatgagact

SEQ ID NO: 995 - DNA, 50 bp, Homo sapiens
aggtttcttacccaacacaaatggacagtggatttgactttctaaagact

SEQ ID NO: 996 - DNA, 50 bp, Homo sapiens
cctggtgatgggaagggtcttgtgttttaatgccaataaatgtgccagct

SEQ ID NO: 997 - DNA, 50 bp, Homo sapiens
aaaatattgagccaggccctggggaagtgggaagtgagagccagagcggc

SEQ ID NO: 998 - DNA, 50 bp, Homo sapiens
agcacacaaggaatcccagaaaatgttggctgaaggaataaatggatgga

SEQ ID NO: 999 - DNA, 50 bp, Homo sapiens
cactgcctaccgccattcatgattaaaccatccagaaataccatccctgt

SEQ ID NO: 1000 - DNA, 50 bp, Homo sapiens
aaatgagatggcctctgcggacacatgaaagggtacttcagcttaccaaa

SEQ ID NO: 1001 - DNA, 50 bp, Homo sapiens
tggactaggagagacttgattttggtgctaaagttccccagttcatatgt

SEQ ID NO: 1002 - DNA, 50 bp, Homo sapiens
ctcacagccagcacgacccccagaaagaggcgtcccacaataaacacgtc

SEQ ID NO: 1003 - DNA, 50 bp, Homo sapiens
acagaacattgagatgtgcctagttccgtatttacagtttggtctggctg

SEQ ID NO: 1004 - DNA, 50 bp, Homo sapiens
tgaatttcagatgggtgatttaagtgagtcacaagtcacaaaactttgct

SEQ ID NO: 1005 - DNA, 50 bp, Homo sapiens
tgtacttaagtgctgatgactgttagccagtttacaactttttaccatcg

SEQ ID NO: 1006 - DNA, 50 bp, Homo sapiens
ttctgaacattttagtcaagctacaacaggtttggaaaacctctgtgggg

SEQ ID NO: 1007 - DNA, 50 bp, Homo sapiens
tgtcaagggcattaaaagcctcctgaagcataatcttatcaaagggatac

SEQ ID NO: 1008 - DNA, 50 bp, Homo sapiens
tcagtccatctcaagacctgtgcctgtcagatttcacaattatggagatt

SEQ ID NO: 1009 - DNA, 50 bp, Homo sapiens
ggtaggagtgaaatctctctctcaaactctaggaaagcccgagtcatact

SEQ ID NO: 1010 - DNA, 50 bp, Homo sapiens
acagcaggtgtcatgggtcaagcataaatcatatatagcattttcaggca

SEQ ID NO: 1011 - DNA, 50 bp, Homo sapiens; identical to SEQ ID NO: 1010

SEQ ID NO: 1012 - DNA, 50 bp, Homo sapiens
tgtgggtccctatgagtgtagagcccatatccccatagagtctacctaga

SEQ ID NO: 1013 - DNA, 50 bp, Homo sapiens
tgttttcatttcagaacattgtgctgtctgtcagcatatgtatatcagct

SEQ ID NO: 1014 - DNA, 50 bp, Homo sapiens
tggctactgcaaaaccagttttgacaggtcagattttcatatgtataggt

SEQ ID NO: 1015 - DNA, 50 bp, Homo sapiens
agaggttctgaaaggtctgtgtcttgtcaaaacaagtaaacggtggaact

SEQ ID NO: 1016 - DNA, 50 bp, Homo sapiens
atgcgtcctggttttcaatcgctgctgaacaaacctatcaaaaatgtagc

SEQ ID NO: 1017 - DNA, 50 bp, Homo sapiens
agtatgatccctcaaaacctcactaactggaaggatgattttgtctcagt

SEQ ID NO: 1018 - DNA, 50 bp, Homo sapiens
gagggttcctcactgaggttgagaggtgtgttggataggactgatcccac

SEQ ID NO: 1019 - DNA, 50 bp, Homo sapiens
aagtgtggttcctgaaggctgtctttgtaactttttgtagttctttgtgt

SEQ ID NO: 1020 - DNA, 50 bp, Homo sapiens; identical to SEQ ID NO: 798

SEQ ID NO: 1021 - DNA, 50 bp, Homo sapiens
ctggaaagggggctaagatcagggccttcattctggatcaggcgaaattt

SEQ ID NO: 1022 - DNA, 50 bp, Homo sapiens
gttcctcttcgggaagcttttgataaggaattctcagaccgatagggtgt

SEQ ID NO: 1023 - DNA, 50 bp, Homo sapiens
agttttgtacttttcacatagcttgttgccccgtaaaagggttaacagca

SEQ ID NO: 1024 - DNA, 50 bp, Homo sapiens
ttggatctggttctgaggaggacacacctggcatcggatgacctttataa

SEQ ID NO: 1025 - DNA, 50 bp, Homo sapiens
tagacatgcttgtgtccacacagcacaccaatgtgatacttccactgacc

SEQ ID NO: 1026 - DNA, 50 bp, Homo sapiens
atgggatgcggtgggttgcccaataaacggctgtggagtggaaattcctc

SEQ ID NO: 1027 - DNA, 50 bp, Homo sapiens
tttgtacgtagctgttacatgtagggcaatctgtctttaagtagggataa

SEQ ID NO: 1028 - DNA, 50 bp, Homo sapiens; identical to SEQ ID NO: 38

SEQ ID NO: 1029 - DNA, 50 bp, Homo sapiens
gagatgagttttgttattttggggttttcaagcattggaaccaaaggcca

SEQ ID NO: 1030 - DNA, 50 bp, Homo sapiens
tcacttagacccctgtaacaggttaaatcttcatggtgttctgtttccta

SEQ ID NO: 1031 - DNA, 50 bp, Homo sapiens
gctctccagactgttacagtgcatgagtgataataaaaatgagtcagtca

SEQ ID NO: 1032 - DNA, 50 bp, Homo sapiens
ggaggtaaacattggagatgtttgtgaaaatattactcttgctgtgaggt

SEQ ID NO: 1033 - DNA, 50 bp, Homo sapiens
ggcccctttctttcttctgaggattgcagaggatatagttatcaatctct

SEQ ID NO: 1034 - DNA, 50 bp, Homo sapiens
tcaacagcacttaaactgaagtttgggttgctcatacaataaacagattg

SEQ ID NO: 1035 - DNA, 50 bp, Homo sapiens
gggccattttatgatgcattgcacaccctctggggaaattgatctttaaa

SEQ ID NO: 1036 - DNA, 50 bp, Homo sapiens
ttttccacaggggacctacccctattgcggtcctccagctcatctttcac

SEQ ID NO: 1037 - DNA, 50 bp, Homo sapiens
gggtgagaacacttgcaacagtttattaatgaggtgactttcaccttagg

SEQ ID NO: 1038 - DNA, 50 bp, Homo sapiens
aatgtaccatcaataaaattggctgcttgggcagttttagttaccacctt

SEQ ID NO: 1039 - DNA, 50 bp, Homo sapiens
ttttcagaggcttcctaattaatcttgccctcctccatttcagtccattt

SEQ ID NO: 1040 - DNA, 50 bp, Homo sapiens
agctccaaccttacgatggagaattaaacttgcttgtatttccactttgt

SEQ ID NO: 1041 - DNA, 50 bp, Homo sapiens
agcttcctcttcctcaggacagcttctactttagatgatccaataatgat

SEQ ID NO: 1042 - DNA, 50 bp, Homo sapiens
cactgacttctattccatgagctttttcaaggcgcttattttatggcagc

SEQ ID NO: 1043 - DNA, 50 bp, Homo sapiens
tgtttcgtaaattaaataggtctggcccagaagacccactcaattgcctt

SEQ ID NO: 1044 - DNA, 50 bp, Homo sapiens
ggaagacccaaggaaatccggaatttcgcaccagaggacccaccacgtcc

SEQ ID NO: 1045 - DNA, 50 bp, Homo sapiens
tcttgttacttccaaggagaaccaagaatggctctgtcacactcgaagcc

SEQ ID NO: 1046 - DNA, 50 bp, Homo sapiens
tctttctctaaagcttgtttgatgaaactggttggtcctttcagtgaaca

SEQ ID NO: 1047 - DNA, 50 bp, Homo sapiens
gctgtgtgacttagtagataaaatactgccttctgcctttgggaccatga

SEQ ID NO: 1048 - DNA, 50 bp, Homo sapiens
tctgtaattggacagctctctcgaagagatcttacagactgtatcagtct

SEQ ID NO: 1049 - DNA, 50 bp, Homo sapiens
ggtcgtggacgtggtcagccacctcagtaaaattggagaggattcttttg

SEQ ID NO: 1050 - DNA, 50 bp, Homo sapiens
aaagtgaaaccaagagtacaagagacaggtgaaattaaagagccccttga

SEQ ID NO: 1051 - DNA, 50 bp, Homo sapiens
gtccaggatgcagagctaaaggccctcctccagagttctacaagtcgaaa

SEQ ID NO: 1052 - DNA, 50 bp, Homo sapiens
ccaacttgagatgtatgaaggcttttggtctccctgggagtgggtggagg

SEQ ID NO: 1053 - DNA, 50 bp, Homo sapiens
ttcctcatcccatttacagtttttctaactccagggtagtgtttagtgtt

SEQ ID NO: 1054 - DNA, 50 bp, Homo sapiens
catgccaaagactcaactgctttcaaagataatgtgggtgctagatgcag

SEQ ID NO: 1055 - DNA, 50 bp, Homo sapiens
tccccttctcccctgcactgtaaaatgtgggattatgggtcacaggaaaa

SEQ ID NO: 1056 - DNA, 50 bp, Homo sapiens
accatgcatagagtcaatcaaatccttgtgatgttttgtatggactttga

SEQ ID NO: 1057 - DNA, 50 bp, Homo sapiens
tgtgctgcctcaagactgctggagtcaggacattttatagagccttttcc

SEQ ID NO: 1058 - DNA, 50 bp, Homo sapiens
gtgcagtctcttagcagacttcaggcccaaactgtattcttcactcaggc

SEQ ID NO: 1059 - DNA, 50 bp, Homo sapiens
gttagtgaaagctgtttactgtaacggggaaaaccagattctttgcatct

SEQ ID NO: 1060 - DNA, 50 bp, Homo sapiens
gcttctgtaaatgccatcccaatgtggtttggttttgttgaacagaaacc

SEQ ID NO: 1061 - DNA, 50 bp, Homo sapiens
ttgcctcgataagtttccaagtcactgaaatctgctgaaggttttactgt

SEQ ID NO: 1062 - DNA, 50 bp, Homo sapiens
acttctgaactgaggaatttgctgttgacagccaaagtatagtgtacaag

SEQ ID NO: 1063 - DNA, 50 bp, Homo sapiens
agagccatctggtgtgaagaactctatatttgtatgttgagagggcatgg

SEQ ID NO: 1064 - DNA, 50 bp, Homo sapiens
agaacaagtttgccttgattttgtttaaaatgacttctgctaagcaccca

SEQ ID NO: 1065 - DNA, 50 bp, Homo sapiens
cctgccaaagcaagaagaaggcttggtccccagaaacaaacagtagtcat

SEQ ID NO: 1066 - DNA, 50 bp, Homo sapiens
ggagtctcaggccaaggatgtcattgaagagtatttcaaatgcaagaaat

SEQ ID NO: 1067 - DNA, 50 bp, Homo sapiens; identical to SEQ ID NO: 1066

SEQ ID NO: 1068 - DNA, 50 bp, Homo sapiens
tttcatctgaatccagaggtgcatcaaattaaatgacagctccacttggc

SEQ ID NO: 1069 - DNA, 50 bp, Homo sapiens
ttgacacgttccacttcctttgcaattattgtatttagttgtgcactagt

SEQ ID NO: 1070 - DNA, 50 bp, Homo sapiens
ccaaatcaactgtgtgaactgtttctgcactgcttgctaatggtttcatc

SEQ ID NO: 1071 - DNA, 50 bp, Homo sapiens
attgagacgggaaaaactcgctgtaaaataatgccaacctagataatgct

SEQ ID NO: 1072 - DNA, 50 bp, Homo sapiens
tgttcttgcattgcatttaatgatcccttttctccccacctccacacact

SEQ ID NO: 1073 - DNA, 50 bp, Homo sapiens
tgcagattcctagtagcatgccttacctacagcactatgtgcatttgctg

SEQ ID NO: 1074 - DNA, 50 bp, Homo sapiens
gcaagaccgtttgtccacttcattttgtataatcacagttgtgttcctga

SEQ ID NO: 1075 - DNA, 50 bp, Homo sapiens
aatttaacttttgggtgccaggaaatgggttttctcaaagtccattgccg

SEQ ID NO: 1076 - DNA, 50 bp, Homo sapiens
tcgtggaagggagagccatcagcagaaagagaccctgagatcttcgcctg

SEQ ID NO: 1077 - DNA, 50 bp, Homo sapiens
aaacacaccagggagacaccataaaacagaccaagactaacttaaaaaca

SEQ ID NO: 1078 - DNA, 50 bp, Homo sapiens
aaccacaatcaaacatataaataagcctggaaaaccaactacaaccagca

SEQ ID NO: 1079 - DNA, 50 bp, Homo sapiens
tttcctgattatttgatgctagctggaattcaagaaatggcattgacctt

SEQ ID NO: 1080 - DNA, 50 bp, Homo sapiens
tcaccccaagtagcatgactgatctgcaatttaaaattcctgtgatctgt

SEQ ID NO: 1081 - DNA, 50 bp, Homo sapiens
tgagaagtgcggaataggttgcttctaccacctgttcttaatgtaacagt

SEQ ID NO: 1082 - DNA, 50 bp, Homo sapiens
tcgaatgagtggtcaggtagtcttaaagagcctcatgttaaatagacaca

SEQ ID NO: 1083 - DNA, 50 bp, Homo sapiens
tgaagtgcaaataaaagcactgctactataagacattctggaatggttgt

SEQ ID NO: 1084 - DNA, 50 bp, Homo sapiens
gcagtccccagatccagaacatgggaagttagggaaaatgtgtgattttg

SEQ ID NO: 1085 - DNA, 50 bp, Homo sapiens
aggtatgacaggaactgtcttcatgtccttacccaagcaagtcatccatg

SEQ ID NO: 1086 - DNA, 50 bp, Homo sapiens
aattttgaatttctccttgccacgttaataaagccaaaagcagcgggtgc

SEQ ID NO: 1087 - DNA, 50 bp, Homo sapiens
tgactctgtgctggcaaaaatgcttgaaacctctatatttctttcgttca

SEQ ID NO: 1088 - DNA, 50 bp, Homo sapiens
gctctcccacagaaacctttgtccttgcaactttatcctttgtcccgatt

SEQ ID NO: 1089 - DNA, 50 bp, Homo sapiens
ttgccttagccagtgtacctcctacctcagtctatgtgagaggaagagaa

SEQ ID NO: 1090 - DNA, 50 bp, Homo sapiens
actgtattgggattgtaaagaacatctctgcactcagacagtttacagaa

SEQ ID NO: 1091 - DNA, 50 bp, Homo sapiens
gtgtgtgtgcatgtgtgtgttagcagaggtattttactcagaaaataggt

SEQ ID NO: 1092 - DNA, 50 bp, Homo sapiens
gccagtcaaaaagtaaaatgaagagaggcacgccaaccactccaaaattt

SEQ ID NO: 1093 - DNA, 50 bp, Homo sapiens
cactttgtggtcgaaaggctcagcctctctacatgaagtctgtggacatg

SEQ ID NO: 1094 - DNA, 50 bp, Homo sapiens
aggctttcttgtctcagcaactttcccatcttgtctctcttggatgatgt

SEQ ID NO: 1095 - DNA, 50 bp, Homo sapiens
tttttctttttgaagcatggaaaacaaatcttttatgccactccagccat

SEQ ID NO: 1096 - DNA, 50 bp, Homo sapiens
ccatgatataaggaagggccgtgcctcatggaaaagcaacaggtggcctc

SEQ ID NO: 1097 - DNA, 50 bp, Homo sapiens
taaaggcgagcaccgtcaggagcgcagagatcggccctactagatgcaga

SEQ ID NO: 1098 - DNA, 50 bp, Homo sapiens
tgagcctgacacctgtgtttcagcatttggagacatccccatgttattct

SEQ ID NO: 1099 - DNA, 50 bp, Homo sapiens
ctgagccacatccaagcctggtttgctgcactctattgccaaagactgac

SEQ ID NO: 1100 - DNA, 50 bp, Homo sapiens
acttgcctcattctcatcatccaaactgaacatttgtatcccaagcagaa

SEQ ID NO: 1101 - DNA, 50 bp, Homo sapiens
gtatgaagaaggaagcccagcagagcaggaggcagcagcaacaatgagag

SEQ ID NO: 1102 - DNA, 50 bp, Homo sapiens
ctgtgtgtgtccatgtctgcaagcagttcttcaataaatggcctgcctcc

SEQ ID NO: 1103 - DNA, 50 bp, Homo sapiens
tcaaagcagagcacagagttatttggtgtttgctgaagacagcctttgtg

SEQ ID NO: 1104 - DNA, 50 bp, Homo sapiens
acttccatctcagctaatgcacccaccagctcaaacacaccaataaagct

SEQ ID NO: 1105 - DNA, 50 bp, Homo sapiens
tgcaatccacaatctgacattctcaggaagcccccaagttgatatttcta

SEQ ID NO: 1106 - DNA, 50 bp, Homo sapiens
cagaaaccaatactgctgtgcactgagaataaaaactcatgcccccttgt

SEQ ID NO: 1107 - DNA, 50 bp, Homo sapiens
caccagtgaggattactgatgtggacagttgatggggtttgtttctgtat

SEQ ID NO: 1108 - DNA, 50 bp, Homo sapiens; identical to SEQ ID NO: 500

SEQ ID NO: 1109 - DNA, 50 bp, Homo sapiens
taaggggtagacaagataccgaataatctccacaagtttatttgtggtct

SEQ ID NO: 1110 - DNA, 50 bp, Homo sapiens
acatcaacagtggtgctgtggaatgcccagccagttaagcacaaaggaaa

SEQ ID NO: 1111 - DNA, 50 bp, Homo sapiens
acaaacaatgcaaccaactatccaagtgttataccaactaaaacccccaa

SEQ ID NO: 1112 - DNA, 50 bp, Homo sapiens
ttcacctacaaaatttcacctgcaaaccttaaacctgcaaaattttcctt

SEQ ID NO: 1113 - DNA, 50 bp, Homo sapiens
gggtacttctccataaggcatctcagtcaaatccccatcactgtcataaa

SEQ ID NO: 1114 - DNA, 50 bp, Homo sapiens
cttgctgttttccctgtccacatccatgctgtacagacaccaccattgaa

SEQ ID NO: 1115 - DNA, 50 bp, Homo sapiens
aagtcaattcctggaatttgaaagagcaaataaagacctgagaaccttcc

SEQ ID NO: 1116 - DNA, 50 bp, Homo sapiens
aagctactgtgtgtgtgaatgaacactcttgctttattccagaatgctgt

SEQ ID NO: 1117 - DNA, 50 bp, Homo sapiens
tgtcatgctcccagaatttcagcttcagcttaactgacagatgttaaagc

SEQ ID NO: 1118 - DNA, 50 bp, Homo sapiens
aggtggtactcaagccatgctgcctccttacatcctttttggaacagagc

SEQ ID NO: 1119 - DNA, 50 bp, Homo sapiens; identical to SEQ ID NO: 75

SEQ ID NO: 1120 - DNA, 50 bp, Homo sapiens
tgtggttaggaagcaatttcccaatgtacctataagaaatgtgcatcaag

SEQ ID NO: 1121 - DNA, 50 bp, Homo sapiens
gcctgcgttgccacttgtcttaactctgaatatttcatttcaaaggtgct

SEQ ID NO: 1122 - DNA, 50 bp, Homo sapiens
agctaatattgctgcaatggctggcaggaaacaggtgatcaagagtgtca

SEQ ID NO: 1123 - DNA, 50 bp, Homo sapiens
tcgaccccagaggtgaatgtattgttattattgttttgttgttgttgtga

SEQ ID NO: 1124 - DNA, 50 bp, Homo sapiens
tccttggcagctgtattctggagtctggatgttgctctctaaagaccttt

SEQ ID NO: 1125 - DNA, 50 bp, Homo sapiens
tttgccatgtccagtacagaataatttgtacttagtatttgcagcagggt

SEQ ID NO: 1126 - DNA, 50 bp, Homo sapiens
tagagaacctatagcatcttctcattcccatgtggaacaggatgcccaca

SEQ ID NO: 1127 - DNA, 50 bp, Homo sapiens
aactcatgtgcaggtttgataaacaccagaacagaagacagtgatgctgt

SEQ ID NO: 1128 - DNA, 50 bp, Homo sapiens
tggccctgacagtattcattatttcagataattccctgtgataggacaac

SEQ ID NO: 1129 - DNA, 50 bp, Homo sapiens
acctggagagagaaggtattgaaacatctcctttatgtgtgactttccca

SEQ ID NO: 1130 - DNA, 50 bp, Homo sapiens
agaaatacccactaacaaagaacaagcattagttttggctgtcatcaact

SEQ ID NO: 1131 - DNA, 50 bp, Homo sapiens
atgggcaaattcttaggtaagacaaaaacacagccccaagggcaggtagt

SEQ ID NO: 1132 - DNA, 50 bp, Homo sapiens
gctgatgccactacccgatttgtttatttgcaatttgagccatttaaaga

SEQ ID NO: 1133 - DNA, 50 bp, Homo sapiens
cctgttcccttcagccaacccgtttctgcagtaaaattaagcctgtcaaa

SEQ ID NO: 1134 - DNA, 50 bp, Homo sapiens
tggcttaaaccagtgttcagtctggtgccaaacttcgaatggaatacaaa

SEQ ID NO: 1135 - DNA, 50 bp, Homo sapiens
tgtgagttgtgaccatgtaacatgagaggttttgctagggcctattattt

SEQ ID NO: 1136 - DNA, 50 bp, Homo sapiens
agctgagtaattctaatctcttctgtgttttccttgccttaaccacaaat

SEQ ID NO: 1137 - DNA, 50 bp, Homo sapiens
aatttgctagaatccagtaaatcattttggtagctctggctgtgctatca

SEQ ID NO: 1138 - DNA, 50 bp, Homo sapiens
tggctcgaagtttctctagtgttttctgtggaaggaataaaaatttgagt

SEQ ID NO: 1139 - DNA, 50 bp, Homo sapiens
actcttgggagtgctgcagtctttaatcatgctgtttaaactgttgtggc

SEQ ID NO: 1140 - DNA, 50 bp, Homo sapiens
tttacatgattggaccctcagattctgttaaccaaaattgcagaatgggg

SEQ ID NO: 1141 - DNA, 50 bp, Homo sapiens
tgaaatcaaagcacggtgcagaacttgtaccaagtacaaaaggtccatgt

SEQ ID NO: 1142 - DNA, 50 bp, Homo sapiens
ccttactctgtccttgatggaggggagaagggagggcaaagaagttaaat

SEQ ID NO: 1143 - DNA, 50 bp, Homo sapiens
caccgccatgcaactccatgcctatttactggaaacctgttatgccaaac

SEQ ID NO: 1144 - DNA, 50 bp, Homo sapiens
caagagaatgaaggaggctaaggagaagcgccaggaacaaattgcgaaga

SEQ ID NO: 1145 - DNA, 50 bp, Homo sapiens
agtctcgggtatgctgttgtgaaattgaaactgtaaaagtagatggttga

SEQ ID NO: 1146 - DNA, 50 bp, Homo sapiens
actaaactacccgaaggacttaggtgctttgtgtacttaaccccaggacc

SEQ ID NO: 1147 - DNA, 50 bp, Homo sapiens
gccaccactgtctgtttgagactccttcatgagcaaagattgatgtatgg

SEQ ID NO: 1148 - DNA, 50 bp, Homo sapiens
atgaatttgaagacatggtggctgaaaagcggctcatcccagatggttgt

SEQ ID NO: 1149 - DNA, 50 bp, Homo sapiens
agcttcagtctctactggattagccctactctttcctttcccctccatta

SEQ ID NO: 1150 - DNA, 50 bp, Homo sapiens
agatgtggttatcacaagtctcgagggggaaactactgcataaaataact

SEQ ID NO: 1151 - DNA, 50 bp, Homo sapiens
tcagtaaaaatgcctgttgtgagatgaacctcctgtaacttctatctgtt

SEQ ID NO: 1152 - DNA, 50 bp, Homo sapiens
agttaactgcggagccaagagttggactataattaaattaccttccttgt

SEQ ID NO: 1153 - DNA, 50 bp, Homo sapiens
ccggtttgggttgttaatggttgaaaacttagaggaacatagtgaggcct

SEQ ID NO: 1154 - DNA, 50 bp, Homo sapiens; identical to SEQ ID NO: 1153

SEQ ID NO: 1155 - DNA, 50 bp, Homo sapiens
ccagtgatttgattaactcagggcaaggctgaatatcagagtgtatcgca

SEQ ID NO: 1156 - DNA, 50 bp, Homo sapiens; identical to SEQ ID NO: 386

SEQ ID NO: 1157 - DNA, 50 bp, Homo sapiens
actggacatcgccctacgcaacctcctcgccatgactgataagttccttt

SEQ ID NO: 1158 - DNA, 50 bp, Homo sapiens
actgctggtagcatttatctgacttggaaagttggagaagaggcattcct

SEQ ID NO: 1159 - DNA, 50 bp, Homo sapiens
cttccgaagagaagaggctggggctgtaactggaaaggggaagcgcacag

SEQ ID NO: 1160 - DNA, 50 bp, Homo sapiens
cctgaccttgagctctagtctcccctttaaatcttaccttggcagtaaca

SEQ ID NO: 1161 - DNA, 50 bp, Homo sapiens
ttggtcccacagtttttatgtgtcctacttgaaattatgtttgctcccgt

SEQ ID NO: 1162 - DNA, 50 bp, Homo sapiens
tggaggatttttgttaagtcaagtgtcaatcgaagttaaaaagcaagggt

SEQ ID NO: 1163 - DNA, 50 bp, Homo sapiens
atggctcttttcctattagagcaacttgtgtttccctgataatgtgtaca

SEQ ID NO: 1164 - DNA, 50 bp, Homo sapiens
gtcgtgactgacttggtgtgttgctattgtgtttctatatactccgtcca

SEQ ID NO: 1165 - DNA, 50 bp, Homo sapiens
tttagtccagtggtttccacagctggctaagccaggagtcacttggaggc

SEQ ID NO: 1166 - DNA, 50 bp, Homo sapiens
tggaagacagtaaagaacagccctctgtagtcagtaaagtttcaccttct

SEQ ID NO: 1167 - DNA, 50 bp, Homo sapiens
tgggtggagtattatgtttaactggagttgtcaagtatgagtccctcagg

SEQ ID NO: 1168 - DNA, 50 bp, Homo sapiens
aaagtagtaaatcgggctgtcttaatagtgcgcctgttactaatggaatt

SEQ ID NO: 1169 - DNA, 50 bp, Homo sapiens
atgtcaagctttgggtctctggagtataactttttgtaacattagccatt

SEQ ID NO: 1170 - DNA, 50 bp, Homo sapiens
atctaggacacctccatcaaacctcctcttgcactttccctctggcttcc

SEQ ID NO: 1171 - DNA, 50 bp, Homo sapiens
tgtgatgggaacagtgtcttagggagatgcagcttggacttgaggtaaat

SEQ ID NO: 1172 - DNA, 50 bp, Homo sapiens
agaatgggaggccaaccttctatcagagttaaacttttgacaagggaaca

SEQ ID NO: 1173 - DNA, 50 bp, Homo sapiens
aaaaatgtgaaactgccctgcctcccctttttgctgacaacactgtgtac

SEQ ID NO: 1174 - DNA, 50 bp, Homo sapiens
ggccccattacaaaactccttaggaacctcgccctctctctgctgtaagg

SEQ ID NO: 1175 - DNA, 50 bp, Homo sapiens
gctgctgtctagatttatgtgtgctctgacaagaaatgttttgtgtaaca

SEQ ID NO: 1176 - DNA, 50 bp, Homo sapiens
ccaggctgcggtgagaatgccaagaaggcactacctcccacccacatcac

SEQ ID NO: 1177 - DNA, 50 bp, Homo sapiens
ccagttgtcttgaacagcctgactcctgccagccctatggaagttccttt

SEQ ID NO: 1178 - DNA, 50 bp, Homo sapiens; identical to SEQ ID NO: 1177

SEQ ID NO: 1179 - DNA, 50 bp, Homo sapiens
tctttaagaagaccaccacatagaataccccttcctatcagctcgctctg

SEQ ID NO: 1180 - DNA, 50 bp, Homo sapiens
tttgactttcaggatgtcatactacttctgtacctagcattttcagtcct

SEQ ID NO: 1181 - DNA, 50 bp, Homo sapiens
tgcttagatttgttcctgttgtcaaaactgttacccccaaaattggtgtg

SEQ ID NO: 1182 - DNA, 50 bp, Homo sapiens
aacaaggtacatgcattatgtgtcacattactgggcaaactgttcaagta

SEQ ID NO: 1183 - DNA, 50 bp, Homo sapiens
agcacaagcagtgtctgtcactttccatgcataaagtttagtgagatgtt

SEQ ID NO: 1184 - DNA, 50 bp, Homo sapiens
agtgactaaatactgggaacctattttctcaatcttcctccatgttgtgt

SEQ ID NO: 1185 - DNA, 50 bp, Homo sapiens
cttcaggactgtatgagccgagcagttacaagacacaaagaagttaaaaa

SEQ ID NO: 1186 - DNA, 50 bp, Homo sapiens
agggccagatttcatgttgaccctggggatgctgtgaatttctcctgcag

SEQ ID NO: 1187 - DNA, 50 bp, Homo sapiens
aaatgcaggtttattatccagcactgagagagttaacaaggactggaaaa

SEQ ID NO: 1188 - DNA, 50 bp, Homo sapiens; identical to SEQ ID NO: 1187

SEQ ID NO: 1189 - DNA, 50 bp, Homo sapiens
ccctccttaatcaacttcaaggagcaccttcattagtacagcttgcatat

SEQ ID NO: 1190 - DNA, 50 bp, Homo sapiens
aaaccagtgactcctaatctttttcaagttaagacaccttaccattgctt

SEQ ID NO: 1191 - DNA, 50 bp, Homo sapiens
aagggaacacaaaactgtggtcctgacaatactaattctacccgttttca

SEQ ID NO: 1192 - DNA, 50 bp, Homo sapiens
tttttgtacgatcagccttactgctaataaaagcacttccacagggaaaa

SEQ ID NO: 1193 - DNA, 50 bp, Homo sapiens
aaattctacaaaggagaggttgggcgttacaaaggcattgtgaatctaat

SEQ ID NO: 1194 - DNA, 50 bp, Homo sapiens; identical to SEQ ID NO: 1193

SEQ ID NO: 1195 - DNA, 50 bp, Homo sapiens
ttcaccgaggacatgaaactccaccttgcggggataaagagagaaaaaca

SEQ ID NO: 1196 - DNA, 50 bp, Homo sapiens
tgtgctcttcagtagaggattttctgtgatcctacaatgaagggaaagct

SEQ ID NO: 1197 - DNA, 50 bp, Homo sapiens
tttgtgtaaaaccaccttttgaagcagcaactatcaagtctgaaaagcaa

SEQ ID NO: 1198 - DNA, 50 bp, Homo sapiens
agtgggtgaatcacagtaatttccctgtaaaatgtggtacctgaagtcat

SEQ ID NO: 1199 - DNA, 50 bp, Homo sapiens
taggctcatagccttgtatttcgttttagattgtaagctcaatggcaggg

SEQ ID NO: 1200 - DNA, 50 bp, Homo sapiens
gctcaagcaaatgtttggtaatgcagacatgaatacatttcccaccttca

SEQ ID NO: 1201 - DNA, 50 bp, Homo sapiens
aagtcatcatttgccttgaaagtttcctctgcattgggtttgaagtagtt

SEQ ID NO: 1202 - DNA, 50 bp, Homo sapiens
gagcaggggtgggagtggctgtaacttcacaatcctaatacagtaaatgt

SEQ ID NO: 1203 - DNA, 50 bp, Homo sapiens
ttcttaaggagtcttaactcggtacttgggttaacgccagaaattacttt

SEQ ID NO: 1204 - DNA, 50 bp, Homo sapiens
ttggtgagttgccaaagaagcaatacagcatatctgcttttgccttctgt

SEQ ID NO: 1205 - DNA, 50 bp, Homo sapiens
aggccttgtttttcagcttcatctgcagttctatgtgaagattgataaat

SEQ ID NO: 1206 - DNA, 50 bp, Homo sapiens
tgcaacttagaaaccagctacagtatggcccacttaataaaacacctgaa

SEQ ID NO: 1207 - DNA, 50 bp, Homo sapiens
agtttattgttagccaggttgcttgaaaggttgagagtggagtggtttgg

SEQ ID NO: 1208 - DNA, 50 bp, Homo sapiens
gcataactgctctagcttcttgtttaccatagtactgtggcttcagattt

SEQ ID NO: 1209 - DNA, 50 bp, Homo sapiens
tgtatcttttcctgttaaacacacagacccctccccaatctggacattga

SEQ ID NO: 1210 - DNA, 50 bp, Homo sapiens
gccttgccagcctgtgtgcttgtgggaacaccttgtacctgagcttacag

SEQ ID NO: 1211 - DNA, 50 bp, Homo sapiens
gcatgaatgggcaatattttcatctgtttacttgtagtgccatagaggcc

SEQ ID NO: 1212 - DNA, 50 bp, Homo sapiens
ggccttctatgtgcttagccataacaattccattaagcaagaaggtaagc

SEQ ID NO: 1213 - DNA, 50 bp, Homo sapiens
aattgaacaataaccattggtgactggagcaggtaattatagcctgcaga

SEQ ID NO: 1214 - DNA, 50 bp, Homo sapiens
aggggtcccaagagcctgtcctcttttgttcaaaatacatcttgaaacgt

SEQ ID NO: 1215 - DNA, 50 bp, Homo sapiens
cctgctgggactccctgacttactttggttggttcctagtgctacttgtt

SEQ ID NO: 1216 - DNA, 50 bp, Homo sapiens
ggaaagctcgtcagtttagtaggctccgaaatagaatagcagttgtcact

SEQ ID NO: 1217 - DNA, 50 bp, Homo sapiens
agaaggtaactttatagaagtaacaccaatatcctagtctgcttgccccg

SEQ ID NO: 1218 - DNA, 50 bp, Homo sapiens
gctgctccctggttccactctggagagtaatctgggacatcttagtgttt

SEQ ID NO: 1219 - DNA, 50 bp, Homo sapiens
ctctcctcttcccacctctgtatcccacacaggcatctggtgatgttctc

SEQ ID NO: 1220 - DNA, 50 bp, Homo sapiens
acacctgttctttgtaattgggttgtggtgcattttgcactacctggagt

SEQ ID NO: 1221 - DNA, 50 bp, Homo sapiens
agcctaggtgaaaatctatttataaatggaccacaactctggggtgtcgt

SEQ ID NO: 1222 - DNA, 50 bp, Homo sapiens
catgaagctctcaagtcctgcatcctgaggatccagatggatgacaagga

SEQ ID NO: 1223 - DNA, 50 bp, Homo sapiens
ggtggtgtttcctagaccttccctgatgcgattttacctttgttgaattt

SEQ ID NO: 1224 - DNA, 50 bp, Homo sapiens
acgatgctgtttgctctggaatgttcatcttttagacaggttttggctca

SEQ ID NO: 1225 - DNA, 50 bp, Homo sapiens
tccgagggatgagattaaggcagaggcaaaagtttcacacaaagtttctg

SEQ ID NO: 1226 - DNA, 50 bp, Homo sapiens
gccacaactcccatagatgccaatgttttgatagcctcagtttctcaacg

SEQ ID NO: 1227 - DNA, 50 bp, Homo sapiens
tgacccacccaccaaggaagaaagcagaataaacatttttgcactgcctg

SEQ ID NO: 1228 - DNA, 50 bp, Homo sapiens
catgctctcccatgacatctccatgctggtttctccatagcataaatgaa

SEQ ID NO: 1229 - DNA, 50 bp, Homo sapiens
ggtgccgtgcatcaccaaatgaaagtttgtatttaacgaggaggtgcttt

SEQ ID NO: 1230 - DNA, 50 bp, Homo sapiens
aaatcctctctgctgttcacattatcctttgtttaacgtatgaaccaggt

SEQ ID NO: 1231 - DNA, 50 bp, Homo sapiens
gtgtagaattcccggagcgtccgtggttcagagtaaacttgaagcagatc

SEQ ID NO: 1232 - DNA, 50 bp, Homo sapiens
tgggtaggttaagctgccatacgtgttcagtgtgaatagtgtttaagttg

SEQ ID NO: 1233 - DNA, 50 bp, Homo sapiens
tgatgcaagagtggacgtaatgctagttggcagtattttattgtaagaaa

SEQ ID NO: 1234 - DNA, 50 bp, Homo sapiens; identical to SEQ ID NO: 1151

SEQ ID NO: 1235 - DNA, 50 bp, Homo sapiens; identical to SEQ ID NO: 1035

SEQ ID NO: 1236 - DNA, 50 bp, Homo sapiens
aaaatgctgctggcttttctgaagacaggtgcttgaacttgtcagtttgt

SEQ ID NO: 1237 - DNA, 50 bp, Homo sapiens
ccgcccaaaagtctgttctgatggcactgagttttcattgttctggatgt

SEQ ID NO: 1238 - DNA, 50 bp, Homo sapiens
tggttgtgctaaattcatagcaggtgccttattctttgcttttagtcaaa

SEQ ID NO: 1239 - DNA, 50 bp, Homo sapiens
tttgccagggtaatcttcagttggccctgattcaattaaatggccttaat

SEQ ID NO: 1240 - DNA, 50 bp, Homo sapiens
acactccttaagttccaaatgttttccgctaatagtctgtcctaaagcct

SEQ ID NO: 1241 - DNA, 50 bp, Homo sapiens
aggactcttgaacatctgagcagttttgtgctttgagccactttttgaca

SEQ ID NO: 1242 - DNA, 50 bp, Homo sapiens
cgcctatatgaacctggacatatggactaccacagcgaataggaatgcaa

SEQ ID NO: 1243 - DNA, 50 bp, Homo sapiens; identical to SEQ ID NO: 1242

SEQ ID NO: 1244 - DNA, 50 bp, Homo sapiens
tttcctattttgctccagactatgttttcagcataccttgggtctgaaca

SEQ ID NO: 1245 - DNA, 50 bp, Homo sapiens
ttgtgctttctgtatttaaaactttggctgtactaagcaaatgcaaggtt

SEQ ID NO: 1246 - DNA, 50 bp, Homo sapiens
ggtcatcatagttgaggtatgtgtctgctatttgcaaagaagttggtcgt

SEQ ID NO: 1247 - DNA, 50 bp, Homo sapiens
ttcaggaccctagaggagagctttatacaattaccgatgtgaatttctct

SEQ ID NO: 1248 - DNA, 50 bp, Homo sapiens
tgttttgcttaatgtggacaatttacacacccaacacatactgtttccaa

SEQ ID NO: 1249 - DNA, 50 bp, Homo sapiens
gagatcaacgggatgaggtgttacagctgcctccctcttcatgcaatctg

SEQ ID NO: 1250 - DNA, 50 bp, Homo sapiens
aggtagggtttaatccccagtaaaattgccatattgcacatgtcttaatg

SEQ ID NO: 1251 - DNA, 50 bp, Homo sapiens
agggggtgatttttgctcttgtcctgagaaataacagtgctgttttaaaa

SEQ ID NO: 1252 - DNA, 50 bp, Homo sapiens
acttgagtggggttttccttttcccccaattctaagagaatataatgtgt

SEQ ID NO: 1253 - DNA, 50 bp, Homo sapiens
gcgtctgttgttagcaaagaatagattcacacagtctaaggtttccttcc

SEQ ID NO: 1254 - DNA, 50 bp, Homo sapiens
ccctcttagcctatccatcttaagccccaagctgagtgtggttctggtaa

SEQ ID NO: 1255 - DNA, 50 bp, Homo sapiens
taaggagaattagactcccaagtagacaccagagtcactgtttggttggt

SEQ ID NO: 1256 - DNA, 50 bp, Homo sapiens
acgtgtttttgggatatgtttccaatctttaaatgaccttgccctgtcca

SEQ ID NO: 1257 - DNA, 50 bp, Homo sapiens
aaccatttgttaactgtactgaaggtgtgtcctcaagaagaaagtgttca

SEQ ID NO: 1258 - DNA, 50 bp, Homo sapiens
aaacaaactgtgtaactgcccaaagcagcacttataaatcagcctaacat

SEQ ID NO: 1259 - DNA, 50 bp, Homo sapiens
aaactgatcacactgactggatctgtccacgacatggaaaataaactgga

SEQ ID NO: 1260 - DNA, 50 bp, Homo sapiens
ttgcattgatgaattttgtatctgcttccattaaaagcataacagccaca

SEQ ID NO: 1261 - DNA, 50 bp, Homo sapiens
atctctccttcagtctgctctgtttaattctgctgtctgctcttctctaa

SEQ ID NO: 1262 - DNA, 50 bp, Homo sapiens
ttgaagttttaagggacgtcagtgtttatgccatttttccagttccaaaa

SEQ ID NO: 1263 - DNA, 50 bp, Homo sapiens
ggtcggctcttatagagtggccatagtgttctgtcaaaacacttgcttcc

SEQ ID NO: 1264 - DNA, 50 bp, Homo sapiens
ttctccttcacagctaagatgccatgtgcaggtggattccatgccgcaga

SEQ ID NO: 1265 - DNA, 50 bp, Homo sapiens
catgattccaaggatcagcctggatgcctagaggactagatcaccttagt

SEQ ID NO: 1266 - DNA, 50 bp, Homo sapiens
agtgaagatctggctgaaccagttccacaaggttactgtatacatagcct

SEQ ID NO: 1267 - DNA, 50 bp, Homo sapiens
aggccatcattctatacctcatttaagccattgttatcaagggtttaccc

SEQ ID NO: 1268 - DNA, 50 bp, Homo sapiens
agagtacatggaaagttaggtgttcaaattcacatctaatttccctggga

SEQ ID NO: 1269 - DNA, 50 bp, Homo sapiens
gttttcagttttcccctttacagtcttctcccctcacctccaggaccctc

SEQ ID NO: 1270 - DNA, 50 bp, Homo sapiens
atccttcagaatgtgttggtttaccagtgacaccccatattcatcacaaa

SEQ ID NO: 1271 - DNA, 50 bp, Homo sapiens
gtctggccttggcttgctcggataaaactttgtatgtattttgtatggca

SEQ ID NO: 1272 - DNA, 50 bp, Homo sapiens
tgctgagcatggggaatgtggctgctgcagagacgttatgaaacacttct

SEQ ID NO: 1273 - DNA, 50 bp, Homo sapiens
tctccatccttgtgaatgtcctcgtctgtttcaaatacagtgcagtcagt

SEQ ID NO: 1274 - DNA, 51 bp, Homo sapiens
tggttcttctgatgagcaagggaacaacactgagaatgaggaggaaggagt

SEQ ID NO: 1275 - DNA, 50 bp, Homo sapiens
tgaagttaaggattacttggctgccatagcataacaatgaagtgactgaa

SEQ ID NO: 1276 - DNA, 50 bp, Homo sapiens
ggctttcttgttttggtgtcttggagtgctgggtaaggttcagtggatat

SEQ ID NO: 1277 - DNA, 50 bp, Homo sapiens
ctatctacaccatcatgcgctggttccggagacacaaggtgcgggctcac

SEQ ID NO: 1278 - DNA, 50 bp, Homo sapiens
gaagcggctggcaactgaaggctggaacacttgctactggataatcgtag

SEQ ID NO: 1279 - DNA, 50 bp, Homo sapiens
aagcaagagattgtaaaccgggtacagaatccaagagatgagagaggacc

SEQ ID NO: 1280 - DNA, 50 bp, Homo sapiens
agacgaatgcttgtcagttgtagctttccaggattctgctccaatgagga

SEQ ID NO: 1281 - DNA, 50 bp, Homo sapiens
caaactgattgcggggcagggacttgagtatggggagaggctgcaaaaga

SEQ ID NO: 1282 - DNA, 50 bp, Homo sapiens
gaacatcaggagaggagtccagagcccacgtctactgcggaaaagtcagg

SEQ ID NO: 1283 - DNA, 50 bp, Homo sapiens
agttggagagttactcgaacctcaggtgacagttgtaaggcagacatagt

SEQ ID NO: 1284 - DNA, 50 bp, Homo sapiens
ctcctccaggcctctcggatgcctctgttgggacagctaagttcctcttc

SEQ ID NO: 1285 - DNA, 50 bp, Homo sapiens
tcctccatatatccaaacaacaaagcataatatttcgcccactaagccaa

SEQ ID NO: 1286 - DNA, 50 bp, Homo sapiens
tgctgttgcaaaagaagaagacatctctgcctgagttttaattttgtcca

SEQ ID NO: 1287 - DNA, 50 bp, Homo sapiens
tttctgctggagtcccctgtgtcctcagccatcccaagaagggtttgctg

SEQ ID NO: 1288 - DNA, 50 bp, Homo sapiens
ctggttggatctgcatctcacgcccactgcacaccgttcctctccatctg

SEQ ID NO: 1289 - DNA, 50 bp, Homo sapiens
acctcgactccctggtgctctttgcagagttgggcagtgaaattaccttt

SEQ ID NO: 1290 - DNA, 50 bp, Homo sapiens
atacacagcacgacgtatccttgtaccgacttctcccggttcttgtttga

SEQ ID NO: 1291 - DNA, 50 bp, Homo sapiens
gtacttaggaagacacagctagatggacaacagcattgggaggcttagcc

SEQ ID NO: 1292 - DNA, 50 bp, Homo sapiens
catctctggttgtgtctgtgccgactcggtgttgaatcaaatcaggtgtg

SEQ ID NO: 1293 - DNA, 50 bp, Homo sapiens
caacaataggaggtggaatgctgcaaggggctgcaaatgagggcaatgca

SEQ ID NO: 1294 - DNA, 50 bp, Homo sapiens
atatttcactttacatccaaacatcactttggcttcgaagccgccgcctg

SEQ ID NO: 1295 - DNA, 50 bp, Homo sapiens
tggcaaattctgcgagtgtgataatttcaactgtgatagatccaatggct

SEQ ID NO: 1296 - DNA, 50 bp, Homo sapiens
tctcacatgtccatttgaaccacccaaaccaaaaacaaagcataagctgg

SEQ ID NO: 1297 - DNA, 50 bp, Homo sapiens
tccaggatgtctacaaaattggtggtattggtactgttcctgttggccga

SEQ ID NO: 1298 - DNA, 50 bp, Homo sapiens
tggacatagcagcacatactacttcagagttcatgatgtagatgtctggt

SEQ ID NO: 1299 - DNA, 50 bp, Homo sapiens
aacagaagacgaggacacagagcgagaataagcacaactcagacaacaca

SEQ ID NO: 1300 - DNA, 50 bp, Homo sapiens
tgaccacttatgcactttctgaatttgctttccatgctcagagttctgct

SEQ ID NO: 1301 - DNA, 50 bp, Homo sapiens
ctttgaccccaccttgtggaaacccagctgtctactggcagacattggtg

SEQ ID NO: 1302 - DNA, 50 bp, Homo sapiens
aaacaccagtttgcaggaagaaaggaagagaatggaaattgcttctggaa

SEQ ID NO: 1303 - DNA, 50 bp, Homo sapiens
ccctaccatgagccctacaaacaactaacctgccactaatagttatgtca

SEQ ID NO: 1304 - DNA, 50 bp, Homo sapiens
agtcgtattagagccttggcgtaatcatggtcatagctgtttcctgtgtg

SEQ ID NO: 1305 - DNA, 50 bp, Homo sapiens
ttgctgcctgatctgacatacatgatccatcgggttttgttacaaggaac

SEQ ID NO: 1306 - DNA, 50 bp, Homo sapiens
catgttcataggtaatctttgtactctgtgtgcagcagtatttggtttgc

SEQ ID NO: 1307 - DNA, 50 bp, Homo sapiens
aattcgccctatagtgagtcgattaccaatcactgcccgcgtttacaacg

SEQ ID NO: 1308 - DNA, 50 bp, Homo sapiens
acaggtaactgaagatcaaagtaaagcaacagaggaatgtacatctacct

SEQ ID NO: 1309 - DNA, 50 bp, Homo sapiens
aacagttgggcaccctgaatggcaaatggcaaatttggagcgctaataat

SEQ ID NO: 1310 - DNA, 50 bp, Homo sapiens
gccaatcactttattgactcctagccgcagacctcctcattctaacctga

SEQ ID NO: 1311 - DNA, 50 bp, Homo sapiens
atgtgggaggggcatggcagctatgaaggacctcctacctctggtttctg

SEQ ID NO: 1312 - DNA, 50 bp, Homo sapiens
catgggacggggagaaaaagcaaaccctggcacttgggaatacttatacc

SEQ ID NO: 1313 - DNA, 50 bp, Homo sapiens
ttgtgcccttgactgggtatttcttgaagcccttggatctacctttggtc

SEQ ID NO: 1314 - DNA, 50 bp, Homo sapiens
acataatacggttgtgcgagcagagaatctacctttccacttctaagcct

SEQ ID NO: 1315 - DNA, 50 bp, Homo sapiens
ccagcctttgcctcttccttcaatgtggtttccatgggaatttgcttcag

SEQ ID NO: 1316 - DNA, 50 bp, Homo sapiens
aaaacctcgagtcatggtgaatgagtgtctcggagttgctcgtgtgtgta

SEQ ID NO: 1317 - DNA, 50 bp, Homo sapiens
gtgagcacggacatgcggcatcatcgagtgagactggtgttccaagattc

SEQ ID NO: 1318 - DNA, 50 bp, Homo sapiens
caccacagtctcagtgcagggctgggaagtgaaagacgattcaccagacc

SEQ ID NO: 1319 - DNA, 50 bp, Homo sapiens
tttgtgggtgggtgattagtcgttgctgatgagatattttgagggtgggg

SEQ ID NO: 1320 - DNA, 50 bp, Homo sapiens
accttgtaagtgcctaagaaatgagactacaagctccatttcagcaggac

SEQ ID NO: 1321 - DNA, 50 bp, Homo sapiens
gccgagatctgctcagactacatggcttccactatagggttctacagtgt

SEQ ID NO: 1322 - DNA, 50 bp, Homo sapiens
aaatcagaattcatttagctcaccacatctcttgaatgtgattgacctac

SEQ ID NO: 1323 - DNA, 50 bp, Homo sapiens
aggtgtttaacagtgttattttgccactggtaatgtgtaaactgtgagtg

SEQ ID NO: 1324 - DNA, 50 bp, Homo sapiens
tggagtttccaggagaaaaataatcacctttgaaggtttttagagcatgt

SEQ ID NO: 1325 - DNA, 50 bp, Homo sapiens
ggtaacaacatccgtctgaaagggtcggacctcgtccaaaggagataggc

SEQ ID NO: 1326 - DNA, 50 bp, Homo sapiens
acattttgatttcttctctctgtggggtggcaagttgagggagcattctt

SEQ ID NO: 1327 - DNA, 50 bp, Homo sapiens
cgtaaaccaatgtggtacactagttggcccgaacttggtataaaccgcct

SEQ ID NO: 1328 - DNA, 50 bp, Homo sapiens
tctttaagtctgtcaaaccagaactctttgaagcactttgaacaatgccc

SEQ ID NO: 1329 - DNA, 50 bp, Homo sapiens
agctggcgtaatagcgaagaggcccgcaccgatcgcctttccaacaagtg

SEQ ID NO: 1330 - DNA, 50 bp, Homo sapiens
agatgcattttaaatgtctataaatggtgtcataactagagcacgggcgt

SEQ ID NO: 1331 - DNA, 50 bp, Homo sapiens
attaaaacgcttggaagaaaatccccttttggcaggtgggggaaaaagca

SEQ ID NO: 1332 - DNA, 50 bp, Homo sapiens
attcaaccaatagcccttgccgtaccgcctacccgtaacattactggagg

SEQ ID NO: 1333 - DNA, 50 bp, Homo sapiens
cgcctatagcactcgaataattcttctcaccctaacaggtcaacctcgct

SEQ ID NO: 1334 - DNA, 50 bp, Homo sapiens
gttgtgcatgattccccacgtgtctctgtttatccagataagaaaagata

SEQ ID NO: 1335 - DNA, 50 bp, Homo sapiens
tcttttaggatttgtcttttagaatctccagtcctcacaggaaaaccccc

SEQ ID NO: 1336 - DNA, 50 bp, Homo sapiens; identical to SEQ ID NO: 1167

SEQ ID NO: 1337 - DNA, 50 bp, Homo sapiens
acctcattctgacacctgcatatagtgtgggaaattgctctgcatttgac

SEQ ID NO: 1338 - DNA, 50 bp, Homo sapiens
gttctggaggacaggaagggtgacccacagaggattataccaccggggtg

SEQ ID NO: 1339 - DNA, 50 bp, Homo sapiens
gccgcagacctcctcattctaacctgaatcgaaggacaaccagtaagcta

SEQ ID NO: 1340 - DNA, 50 bp, Homo sapiens
tgagtcgtattacaattcactggccgtcgttttacaacgtcgtgactggg

SEQ ID NO: 1341 - DNA, 50 bp, Homo sapiens
taagattatcaaccttggggtcgttttgttgttcgcggattgagcacgga

SEQ ID NO: 1342 - DNA, 50 bp, Homo sapiens
ctgggctgaagcctattcctatggggctctggaatgtttgtgactgaatg

SEQ ID NO: 1343 - DNA, 50 bp, Homo sapiens
ttgtccatttggaacagagtcactataaagaacgggctcaactgggcacc

SEQ ID NO: 1344 - DNA, 50 bp, Homo sapiens
gcagacataggcgaagaaaacatggcattgagtgtgctgagtccagacaa

SEQ ID NO: 1345 - DNA, 50 bp, Homo sapiens
cttttcccaccccctccccctccatgtgaagatttgggtgcttaacatat

SEQ ID NO: 1346 - DNA, 50 bp, Homo sapiens
ggcactgcctccttacctgtgaggaatgcaaaataaagcatggattaagt

SEQ ID NO: 1347 - DNA, 50 bp, Homo sapiens
aaaccacaccaggaactccttgcatggcaaaagctgaacagtacaaatcc

SEQ ID NO: 1348 - DNA, 50 bp, Homo sapiens
acacagtcatccccatgcagaaacctcagaaaacaccaatgtattacaca

SEQ ID NO: 1349 - DNA, 50 bp, Homo sapiens
gtctgaacgagactcaattcctctccgaggctccccaaacaaattgtagc

SEQ ID NO: 1350 - DNA, 50 bp, Homo sapiens
gtgcagtccatcagatccaagcctgtctcttgaggaacaaccgcgcagac

SEQ ID NO: 1351 - DNA, 50 bp, Homo sapiens
gacccaggctatggatgaggctgactattactgtcaggcgtgggacagca

SEQ ID NO: 1352 - DNA, 50 bp, Homo sapiens
tggtggcaaatctgatttttggaaacgagtattggaggactataaaacaa

SEQ ID NO: 1353 - DNA, 50 bp, Homo sapiens
acatttcttgttggcactacagcaaccacatacagtacagacaacctcca

SEQ ID NO: 1354 - DNA, 50 bp, Homo sapiens
tgggataaaggtgtgtcggtttagcacctctggaagacctatctagagct

SEQ ID NO: 1355 - DNA, 50 bp, Homo sapiens
cctggcacatgttgtctggagtctggcacactggttatcaatagcacatt

SEQ ID NO: 1356 - DNA, 50 bp, Homo sapiens
gcatgttctcaccgtgaaggagagtgatgcagggagatactactgtgcag

SEQ ID NO: 1357 - DNA, 50 bp, Homo sapiens
aaagtgggtggaagacttcctggtgcaggaggctcactccgatttaaggt

SEQ ID NO: 1358 - DNA, 50 bp, Homo sapiens
ctgtggtctgttatatgagagagatcctttaactagagcaaagagggagt

SEQ ID NO: 1359 - DNA, 50 bp, Homo sapiens
gcttgctgttccttagaattttgccttgtaagttctagctcaagttgggg

SEQ ID NO: 1360 - DNA, 50 bp, Homo sapiens
tttctcagagctggaggttgctgggcacctaaatgatgtttcatgatagc

SEQ ID NO: 1361 - DNA, 50 bp, Homo sapiens
ctttttgtaagttacaacattccactggatccttatattgcctgtagtgg

SEQ ID NO: 1362 - DNA, 50 bp, Homo sapiens
ctcatctatgtcttctaaagcttttctgcattcttccacctgggattcaa

SEQ ID NO: 1363 - DNA, 50 bp, Homo sapiens
ctgtctttggaaggagacacaagaacctgataacattggttgtcttcggg

SEQ ID NO: 1364 - DNA, 50 bp, Homo sapiens
aaacaagaacccacttaaacacagcatcaaactctaccatgaaatgaaga

SEQ ID NO: 1365 - DNA, 50 bp, Homo sapiens
ttcttcctggtcatattcctcttttgattttctaagaacttccctcagga

SEQ ID NO: 1366 - DNA, 50 bp, Homo sapiens
acacaagatactgccactttctctacacaaagacccacccaaacaccagc

SEQ ID NO: 1367 - DNA, 50 bp, Homo sapiens
ctttctcaggaagtggctctgccaggcaggactatgtgggaaagggtttt

SEQ ID NO: 1368 - DNA, 50 bp, Homo sapiens
attacatgctaactcaaacttacaaaatcaagctctctgtgatcctggtt

SEQ ID NO: 1369 - DNA, 50 bp, Homo sapiens
gattaaaggcttccatcgattgggtagtgtccttcaagtgggtggcgaag

SEQ ID NO: 1370 - DNA, 50 bp, Homo sapiens
tgtattaacaggcttattgctatgcagggaaatagaaggggcattacaaa

SEQ ID NO: 1371 - DNA, 50 bp, Homo sapiens
tggtggatggatggaaacacatacctcctaattaacctgttggtggaaac

SEQ ID NO: 1372 - DNA, 50 bp, Homo sapiens
gccttggagtgtgacatttctgcgagaatgcttaaataccgatttcccgc

SEQ ID NO: 1373 - DNA, 50 bp, Homo sapiens
agggagtcgttttaccaattcactggcccgtgttttacaaacgtctgact

SEQ ID NO: 1374 - DNA, 50 bp, Homo sapiens
tggagagcttgggacaaggtcagaatgaaaacataccagtcaatcctgct

SEQ ID NO: 1375 - DNA, 50 bp, Homo sapiens
acctgtgctctttggatacctaatgcgacatttaagttgtatttgacagt

SEQ ID NO: 1376 - DNA, 50 bp, Homo sapiens
aggctgggcacaaaggagaaaggaggacatggaaaatccgacaattcgaa

SEQ ID NO: 1377 - DNA, 51 bp, Homo sapiens
atctcaaatccttgagcactcagtctagtgaagatgttgtcattatgtaca

SEQ ID NO: 1378 - DNA, 50 bp, Homo sapiens
gggtcataggttcatgggtttgttgagaattgtggctcctggtttctggt

SEQ ID NO: 1379 - DNA, 50 bp, Homo sapiens
gccttctttctgctgactgggggctttcatttaaaaggagtctttttaat

SEQ ID NO: 1380 - DNA, 50 bp, Homo sapiens
tgtaaacagtggcaggagcgtggacttaaaacaaggcttgcttatttggt

SEQ ID NO: 1381 - DNA, 50 bp, Homo sapiens
gccctttgggttaagcctttacattcatgaagacccctccagggtagaat

SEQ ID NO: 1382 - DNA, 50 bp, Homo sapiens
aaaaggaaaacgaaaaaggaaaaggtggccaatgtggaaaaagtttcaat

SEQ ID NO: 1383 - DNA, 50 bp, Homo sapiens
actctcaggagccatgaaagctgcacagttactttatataccacgaggca

SEQ ID NO: 1384 - DNA, 50 bp, Homo sapiens
ttatgtcaccagaatgtttgccaacaccccgaaaaggaaccagaggactt

SEQ ID NO: 1385 - DNA, 50 bp, Homo sapiens
aggttatttgagcacagtgaaagcagagtactatggttgtccaacacagg

SEQ ID NO: 1386 - DNA, 50 bp, Homo sapiens
ggcctgccatccgagggactgtgttgtagattgtgatcaaggttgattgg

SEQ ID NO: 1387 - DNA, 50 bp, Homo sapiens
acaggtagttgaataattgtttcaagagctcaacagatgacaagcttctt

SEQ ID NO: 1388 - DNA, 50 bp, Homo sapiens
aatacactttgtgccaagggaagaacactgcatgccctgggtcttcagtc

SEQ ID NO: 1389 - DNA, 50 bp, Homo sapiens
gggaactggaggtgagaagcattataatagcctctctgcctttatctaca

SEQ ID NO: 1390 - DNA, 50 bp, Homo sapiens
acaagccaaagtggcatgttttgtgcatttgtaaatgctgtgttgggtag

SEQ ID NO: 1391 - DNA, 50 bp, Homo sapiens
aacagactgtcgtagaaaactgtctttgcttccaaatcagcagaggacca

SEQ ID NO: 1392 - DNA, 50 bp, Homo sapiens
gcccctcagaagagccaaactttgagttttatgtctgtttgtcattgata

SEQ ID NO: 1393 - DNA, 50 bp, Homo sapiens
ccttgtgtccaacgggaataggaagaattagttactgacttcacctgaga

SEQ ID NO: 1394 - DNA, 50 bp, Homo sapiens
cccacaattggactgatagggggagaaaatccaaagagacggagcaactg

SEQ ID NO: 1395 - DNA, 50 bp, Homo sapiens
aacggcaactgggagatttgtgagtgaacactgtttcatcttaatatgct

SEQ ID NO: 1396 - DNA, 50 bp, Homo sapiens
acatctgagaaaccctgaatcctgcaatcaagtagaagtcaacttcatct

SEQ ID NO: 1397 - DNA, 50 bp, Homo sapiens
gccataggaaggtttaccagtagaatccttgctaggttgatgtgggccat

SEQ ID NO: 1398 - DNA, 50 bp, Homo sapiens
tcatctcaacttagtattatacccacacccacccaagaacagggtttgtt

SEQ ID NO: 1399 - DNA, 50 bp, Homo sapiens
gactgaaagatttagccataatgtaaactgcctcaaattggactttgggc

SEQ ID NO: 1400 - DNA, 50 bp, Homo sapiens
ggcactgtctgtgtccttccttgaactgtctaccctgttgcttttcacaa

SEQ ID NO: 1401 - DNA, 50 bp, Homo sapiens
ggccagccgaggctacaaaaactaaccctggatcctactctcttattaaa

SEQ ID NO: 1402 - DNA, 50 bp, Homo sapiens
actaggttgcaatatgtgaaatcagaggaccaaagtacagatggaaacca

SEQ ID NO: 1403 - DNA, 50 bp, Homo sapiens
ccctgtctgactacaacatccagaaagagtccactctgcacttggtcctg

SEQ ID NO: 1404 - DNA, 50 bp, Homo sapiens
ggcatcgcccatgctcctcacctgtattttgtaatcagaaataaattgct

SEQ ID NO: 1405 - DNA, 50 bp, Homo sapiens
aaagcaacgaaaggaacgcaagaacagaatgaagaaagtcagggggactg

SEQ ID NO: 1406 - DNA, 50 bp, Homo sapiens
tcccactttgtctgtacatactggcctctgtgattacatagatcagccat

SEQ ID NO: 1407 - DNA, 50 bp, Homo sapiens; identical to SEQ ID NO: 1278

SEQ ID NO: 1408 - DNA, 50 bp, Homo sapiens
cagtcacgtcagttatgtagatactgcatggcaggagagctttacgctaa

SEQ ID NO: 1409 - DNA, 50 bp, Homo sapiens
gccacccctcacacagccaaaccccagatcatctgaaactactaactttg

SEQ ID NO: 1410 - DNA, 50 bp, Homo sapiens
gcaggtgaccattggcacacgctagaagtttatggcagagctttacaaat

SEQ ID NO: 1411 - DNA, 50 bp, Homo sapiens
tgccatgctgctaggaaattgtcctttttctttctagctgttaacctact

SEQ ID NO: 1412 - DNA, 50 bp, Homo sapiens
aacttattccagtgttgatcgcaagctgttgatgcacaggcgtcttgtgg

SEQ ID NO: 1413 - DNA, 50 bp, Homo sapiens
tgaaaaggattaaagctggtattctagaacatgcccttcactggttgtgt

SEQ ID NO: 1414 - DNA, 50 bp, Homo sapiens
ggtaaggtttctaggaggtctgttaggtgtacatcctgcagcttattggc

SEQ ID NO: 1415 - DNA, 50 bp, Homo sapiens
tgattctgtaaagctgtggaatgaagctgcagatttagagaacattggct

SEQ ID NO: 1416 - DNA, 50 bp, Homo sapiens
cgattttacacggctgggtagaatttgtagaaaagatccacagggcaagc

SEQ ID NO: 1417 - DNA, 50 bp, Homo sapiens
gctactacttcattgcaacctttattactgaccacatcagacatcatgct

SEQ ID NO: 1418 - DNA, 50 bp, Homo sapiens
gggctgaagtacctaagtgtgaatgtctctcccgttaaactgagtgtaga

SEQ ID NO: 1419 - DNA, 50 bp, Homo sapiens
aggaaaacggttcaccagtgtttagttttatattgaggtgctcaggttgg

SEQ ID NO: 1420 - DNA, 50 bp, Homo sapiens
ccgggccttgcatataaataacggagcatacagtgagcacatctagctga

SEQ ID NO: 1421 - DNA, 50 bp, Homo sapiens
ataatgaaagctaagcctcgggctaatttccccatagccgtggggtgact

SEQ ID NO: 1422 - DNA, 50 bp, Homo sapiens; identical to SEQ ID NO: 75

SEQ ID NO: 1423 - DNA, 50 bp, Homo sapiens
tgctctgttctggtttctgttttcaaatcaaatgcctgtttgggaggaga

SEQ ID NO: 1424 - DNA, 50 bp, Homo sapiens
caaaatcccaaaaccagggccaaggagtggacgcttctcttgtgagccag

SEQ ID NO: 1425 - DNA, 50 bp, Homo sapiens
acaaatttcttggctggatttgaagcttaaactcctgtggattcacatca

SEQ ID NO: 1426 - DNA, 50 bp, Homo sapiens
tccacggttgtgccttattgttccattaaaattgtatcttcgatccatca

SEQ ID NO: 1427 - DNA, 50 bp, Homo sapiens
ggtctgagagtctgtgaagatggcccagtcttctatcccccacctaaaaa

SEQ ID NO: 1428 - DNA, 50 bp, Homo sapiens
acacacaggagggaaaatcctgggattctttttctagggatgtaatacat

SEQ ID NO: 1429 - DNA, 50 bp, Homo sapiens
ctgtttgaactgttgagtttccgttgctggctgagtgcgttttgtccttc

SEQ ID NO: 1430 - DNA, 50 bp, Homo sapiens; identical to SEQ ID NO: 1427

SEQ ID NO: 1431 - DNA, 50 bp, Homo sapiens
ggtacagagaagccagcttgtttacatgcttattccatgactgcttgccc

SEQ ID NO: 1432 - DNA, 50 bp, Homo sapiens; identical to SEQ ID NO: 1431

SEQ ID NO: 1433 - DNA, 50 bp, Homo sapiens
gggagaatgaatgtgcaacgtggctgaaatctattttgtgtaataaaagg

SEQ ID NO: 1434 - DNA, 50 bp, Homo sapiens
ccccaccaccccattaccacagctgcctttgtgtgtttgtgtcaataaaa

SEQ ID NO: 1435 - DNA, 50 bp, Homo sapiens
ccagcaagataatgtcctgtcttctaagatgtgcatcaagcctggtacat

SEQ ID NO: 1436 - DNA, 50 bp, Homo sapiens; identical to SEQ ID NO: 1052

SEQ ID NO: 1437 - DNA, 50 bp, Homo sapiens
gctactagagagcaaggggctttcttaccaccagtgctgaggagaaaagt

SEQ ID NO: 1438 - DNA, 50 bp, Homo sapiens
accaagaaaccagcccctgaaaagaagcctgcagagaagaaacctactac

SEQ ID NO: 1439 - DNA, 50 bp, Homo sapiens
tttcctcatctatgaattgtcattcacacacctacttttctgcttcgttt

SEQ ID NO: 1440 - DNA, 50 bp, Homo sapiens; identical to SEQ ID NO: 1439

SEQ ID NO: 1441 - DNA, 50 bp, Homo sapiens
aataatgacaaatgccctgcacctacccacatgcactcgtgtgagacaag

SEQ ID NO: 1442 - DNA, 50 bp, Homo sapiens
gtgcccctgtgggtcccagggaggtcttaaacaaggtatttttcaactta

SEQ ID NO: 1443 - DNA, 50 bp, Homo sapiens
cagtgaagacgtcaggggcaaggtctcgggggtccggaagggtgatcatc

SEQ ID NO: 1444 - DNA, 50 bp, Homo sapiens
tgcaagggagacatatcctagatcactttgctttttctttaaggagctga

SEQ ID NO: 1445 - DNA, 50 bp, Homo sapiens; identical to SEQ ID NO: 75

SEQ ID NO: 1446 - DNA, 50 bp, Homo sapiens
ttgggggaggttagggacttatcctgtgcttgtaaataaataaggtcatg

SEQ ID NO: 1447 - DNA, 50 bp, Homo sapiens
acttggctgccatagcataacaatgaagtgactgaaaaatccagaatttc

SEQ ID NO: 1448 - DNA, 50 bp, Homo sapiens
aaaatattaaacacaaactaccacctacctccctcaccaaagcccataaa

SEQ ID NO: 1449 - DNA, 50 bp, Homo sapiens
agctgtttggtaaccatagtttcacttgttcaaagctgtgtaatcgtggg

SEQ ID NO: 1450 - DNA, 50 bp, Homo sapiens; identical to SEQ ID NO: 1449

SEQ ID NO: 1451 - DNA, 50 bp, Homo sapiens
tgtcgccttttagaaggagaaacttaagtgtggaatgcattatatgggca

SEQ ID NO: 1452 - DNA, 50 bp, Homo sapiens; identical to SEQ ID NO: 1124

SEQ ID NO: 1453 - DNA, 50 bp, Homo sapiens
tttggagtggaggcattgtttttaagaaaaacatgtcatgtaggttgtct

SEQ ID NO: 1454 - DNA, 50 bp, Homo sapiens
tggctgggacgctagaagggtcatgtgttaactataatcacatttatggt

SEQ ID NO: 1455 - DNA, 50 bp, Homo sapiens
attctggttaaccgctcacatgcataacaataatgctagaaattcaggaa

SEQ ID NO: 1456 - DNA, 50 bp, Homo sapiens
tgctgatttctagtgtatactctgtagtctcagttcgtgtttgattccat

SEQ ID NO: 1457 - DNA, 50 bp, Homo sapiens
aaatgaatctttcaaaggtttcccaaaccactccttatgatccagtgata

SEQ ID NO: 1458 - DNA, 50 bp, Homo sapiens; identical to SEQ ID NO: 1124

SEQ ID NO: 1459 - DNA, 50 bp, Homo sapiens
tgcgtgtgcctcagtttcctcctccacaactgaatatttatagtggctga

SEQ ID NO: 1460 - DNA, 50 bp, Homo sapiens
gggatgtggaggatttttgttaagtgtcaatcgaagttaaaaagcaaggg

SEQ ID NO: 1461 - DNA, 50 bp, Homo sapiens
agctctctgcacccttacccctttccaccttttgtatttaattttaaagt

SEQ ID NO: 1462 - DNA, 50 bp, Homo sapiens
ccctccagccaataggcagctttcttaactatcctaacaagccttggacc

SEQ ID NO: 1463 - DNA, 50 bp, Homo sapiens
cgtggttgtgggaggggaaagaggaaacagagctagtcagatgtgaattg

SEQ ID NO: 1464 - DNA, 50 bp, Homo sapiens
acaatgtgttagcagaaaccagtgggttataatgtagaatgatgtgcttt

SEQ ID NO: 1465 - DNA, 50 bp, Homo sapiens
gctagatccccggtggttttgtgctcaaaataaaaagcctcagtgaccca

SEQ ID NO: 1466 - DNA, 50 bp, Homo sapiens; identical to SEQ ID NO: 1425

SEQ ID NO: 1467 - DNA, 50 bp, Homo sapiens
gctgtggttggttgcattacatgacacagaaaactgtcctctacctcacg

SEQ ID NO: 1468 - DNA, 50 bp, Homo sapiens
gccctggtaggctcctttagaaggaccatttctgttcctagagcttaact

SEQ ID NO: 1469 - DNA, 50 bp, Homo sapiens; identical to SEQ ID NO: 1404

SEQ ID NO: 1470 - DNA, 50 bp, Homo sapiens
tttccctctcctgtccttgtgttgaaggcagtaaactaagggtgtcaagc

SEQ ID NO: 1471 - DNA, 50 bp, Homo sapiens
agactggaaatggggatgagggtgtaaattgtattgaaaaagatcgcgaa

SEQ ID NO: 1472 - DNA, 50 bp, Homo sapiens
ccatgagttgtttggttttccagaagctgccagtgggttcccgtgaattg

SEQ ID NO: 1473 - DNA, 50 bp, Homo sapiens
gatacgatgagatccgccgtcactggggtggcaatgtcctgggtcctaag

SEQ ID NO: 1474 - DNA, 50 bp, Homo sapiens
agtctttctggtttctggagataacccatcaataaagctgcttcctctgg

SEQ ID NO: 1475 - DNA, 50 bp, Homo sapiens
cgatgatggttacccttcatggacgtcttaatcttccacacacatcccct

SEQ ID NO: 1476 - DNA, 50 bp, Homo sapiens
ggcccctggacatgtacctgcagaataataaagtcatcaatacctaaaaa

SEQ ID NO: 1477 - DNA, 50 bp, Homo sapiens
gcaaacctgcagattcccaagatgttcacgagcttgtgctttctaaagaa

SEQ ID NO: 1478 - DNA, 50 bp, Homo sapiens
tccccattgtgccgcctttatcaattgcctgttttgttttgtttgttttt

SEQ ID NO: 1479 - DNA, 50 bp, Homo sapiens
ctttagctgctgttgcctcccttctcaggctggtgctggatccttcctag

SEQ ID NO: 1480 - DNA, 50 bp, Homo sapiens
ctgcttatggcacaatttgcctcaaaatccattccaagttgtatatttgt

SEQ ID NO: 1481 - DNA, 50 bp, Homo sapiens
ctgcttctgggtgcatggtagactttgtggcatttgatacaacttggaca

SEQ ID NO: 1482 - DNA, 50 bp, Homo sapiens
cttatagtatttatccacccaaaccccagactgagatactgctcccaggg

SEQ ID NO: 1483 - DNA, 50 bp, Homo sapiens
gagagaccagcctttcttcctttggtaggaatggcctgagttggcgttgt

SEQ ID NO: 1484 - DNA, 50 bp, Homo sapiens
cagaggtgggagtaactgctggtagtgccttctttggttgtgttgctcag

SEQ ID NO: 1485 - DNA, 50 bp, Homo sapiens
ctgtgtgccccagctgcatcagccagcttctaggtggctccattgttttc

SEQ ID NO: 1486 - DNA, 50 bp, Homo sapiens
agagcagaatagcaatataagagcacagacgaacatagacacgacagcga

SEQ ID NO: 1487 - DNA, 50 bp, Homo sapiens
ctattaggacccagtgattatgctaccttggcacggttagggtactgcgg

SEQ ID NO: 1488 - DNA, 50 bp, Homo sapiens
aaagaagcatgcacacttatcacaaacaactctctcaggtggccagtctg

SEQ ID NO: 1489 - DNA, 50 bp, Homo sapiens
tgctgcctatatgaagtctttgagaaagcccctcttggagtctgtgcctt

SEQ ID NO: 1490 - DNA, 50 bp, Homo sapiens
gatatacgaggacaaaacccatctaccaggcagctaacaaaccgccgcca

SEQ ID NO: 1491 - DNA, 50 bp, Homo sapiens
gccactttattagtaatggtcgatagtccgaatcgatggctagggtgact

SEQ ID NO: 1492 - DNA, 50 bp, Homo sapiens
taatctggcgggttatacccccgtgttctccggattatatttcgggacac

SEQ ID NO: 1493 - DNA, 50 bp, Homo sapiens
gctggatttgtgggtatgggggcggtttttgggcgaaggttggttgttac

SEQ ID NO: 1494 - DNA, 50 bp, Homo sapiens
ccacatcatcgggggcgaaatagaagcccagagagaggctaggtgtagga

SEQ ID NO: 1495 - DNA, 50 bp, Homo sapiens
agggagactctcagccttcagcttcctaaattctgtgtctgtgactttcg

SEQ ID NO: 1496 - DNA, 50 bp, Homo sapiens
ttgtcaagctgctgctgtcttcaagatctacctggtcagaatctcctgct

SEQ ID NO: 1497 - DNA, 50 bp, Homo sapiens
ggccagtctctatgtgtcttaatcccttgtccttcattaaaagcaaaact

SEQ ID NO: 1498 - DNA, 50 bp, Homo sapiens
tctctcacattctgtctttcccctcctccttcaccttccctccgtccctc

SEQ ID NO: 1499 - DNA, 50 bp, Homo sapiens
acacgagactatagagaatgcagcacacagatgagagcagagcaaataga

SEQ ID NO: 1500 - DNA, 50 bp, Homo sapiens
gcatccagatggtggtttactctgcaacagtctaatgttcttcacttcca

SEQ ID NO: 1501 - DNA, 50 bp, Homo sapiens
ggggttttcaccctacctaaagatgctttaattgctgttttccaaattgt

SEQ ID NO: 1502 - DNA, 50 bp, Homo sapiens
atgcctaacaagcaacatgatcctataaatccaccccaagccaatctggt

SEQ ID NO: 1503 - DNA, 50 bp, Homo sapiens
ccaccatctggtacgtttttacttcctcacccgcgtgtactccgattacc

SEQ ID NO: 1504 - DNA, 50 bp, Homo sapiens
gagtatattcccccagttatttgctcttccccacacagggtggtagtacc

SEQ ID NO: 1505 - DNA, 50 bp, Homo sapiens
caaaggaaggggcgtgaaggggtgagaaaaatatgggacccaaattgtgg

SEQ ID NO: 1506 - DNA, 50 bp, Homo sapiens
tttccttacaggcggtaacaccggtccacacagttcttgccaaaacaaag

SEQ ID NO: 1507 - DNA, 50 bp, Homo sapiens
aattttctctcacctcatcactcgggacctccccagtgataataacccgg

SEQ ID NO: 1508 - DNA, 50 bp, Homo sapiens
gcgggtgtaaggggatatcttgataaactggagcccaggaagattacaaa

SEQ ID NO: 1509 - DNA, 50 bp, Homo sapiens
acgccgacaatcaagaaaatgtgagttataacggacaaggttgtattatg

SEQ ID NO: 1510 - DNA, 50 bp, Homo sapiens
gatattggtagtaaaggggttacctgtgaacttccaaaattccttggggc

SEQ ID NO: 1511 - DNA, 50 bp, Homo sapiens
taaagatgtccgggtacacttcgccaagggttagcgtctttgggcatttc

SEQ ID NO: 1512 - DNA, 50 bp, Homo sapiens
tcctaatttcttctgtgaaccttctcaaatcccccagcatgcgtgtagtg

SEQ ID NO: 1513 - DNA, 50 bp, Homo sapiens
ctgcatgatgtcatcaacctgctgtagtgcggaaacgaccacaacacaca

SEQ ID NO: 1514 - DNA, 50 bp, Homo sapiens
aaagacgaacgagacacgaaagcaacgaacgaacacagagcacgccgcac

SEQ ID NO: 1515 - DNA, 50 bp, Homo sapiens
tttcaacacgcatcccttatgggcgaactgtcctcaaacaacaacaagtg

SEQ ID NO: 1516 - DNA, 50 bp, Homo sapiens
taggacgagaaacgaagaaggacagagcgagaacaagtaagcagggacac

SEQ ID NO: 1517 - DNA, 50 bp, Homo sapiens
ggtggagaatcaaaacgaccccgcaaataaacatggcgatttggcttggg

SEQ ID NO: 1518 - DNA, 50 bp, Homo sapiens
tggccttttaaataactgggcttctcacaaccatagtgaacagaaacagc

SEQ ID NO: 1519 - DNA, 50 bp, Homo sapiens
attgtgacatggtgatgcctcattgctgatatggtcctgtggttatgtgc

SEQ ID NO: 1520 - DNA, 50 bp, Homo sapiens
ggaagagataacaccacaacgaaagagcaggcaagagagaccaaagcaca

SEQ ID NO: 1521 - DNA, 50 bp, Homo sapiens
ggtaaaaggcgttactctccgccctcttcaaggaacggccaagagtataa

SEQ ID NO: 1522 - DNA, 50 bp, Homo sapiens
acccaagggtctcgccagtggggttaagtcacaatattactacacaaggg

SEQ ID NO: 1523 - DNA, 50 bp, Homo sapiens
acagtacacaatcacctgcaagggacatagcacacaaaccgctaaagagg

SEQ ID NO: 1524 - DNA, 50 bp, Homo sapiens
tctcacagcgagaggaggagacgggatgaccgagaggtagacgattatac

SEQ ID NO: 1525 - DNA, 50 bp, Homo sapiens
cgctggtgttgtccccaagtgatttattctactggagtgcctggtgtctt

SEQ ID NO: 1526 - DNA, 50 bp, Homo sapiens
ttccggcttttaacaaacacacaccacactaacacaacaacacaaacaaa

SEQ ID NO: 1527 - DNA, 50 bp, Homo sapiens
aagacttgcctctttaaaattgctttgttttctgcagtactatctgtggt

SEQ ID NO: 1528 - DNA, 50 bp, Homo sapiens
gaactcgtccactcttctcgggccactattctggttcagggaatcttggg

SEQ ID NO: 1529 - DNA, 50 bp, Homo sapiens
agcaataaaccgaagcagctagacagcgaagaagtacagcaaagagacga

SEQ ID NO: 1530 - DNA, 50 bp, Homo sapiens
cgcccatactagagaagtttgccctctattgtctctcacaccacaatgag

SEQ ID NO: 1531 - DNA, 50 bp, Homo sapiens
cacagacatccacggacacaaaaggcggggaccaccaccacaatgaacac

SEQ ID NO: 1532 - DNA, 50 bp, Homo sapiens
gcgtcgattgatatcagacagcatcgtctctgcgagcacaaagatctgtt

SEQ ID NO: 1533 - DNA, 50 bp, Homo sapiens
ggaacagggttaatggccaggccctttgccgccccttttaaagggaatcc

SEQ ID NO: 1534 - DNA, 50 bp, Homo sapiens
acagagtaacatgggatatgggtatgagtgggatgtgctgagaaggaact

SEQ ID NO: 1535 - DNA, 50 bp, Homo sapiens
gggggcaaagaaagtacattgggtgaaaatttaaaaaggtatggagcatt

SEQ ID NO: 1536 - DNA, 50 bp, Homo sapiens
caaacgaacagcgaagacaacaactcacgatgctgcacaacgcgaccaac

SEQ ID NO: 1537 - DNA, 50 bp, Homo sapiens
acattttataaggcatttgtgttagccactcagtcatctttgggtgctgc

SEQ ID NO: 1538 - DNA, 50 bp, Homo sapiens
gtcacagcaacgtgtcgctccccagatcatttattagcgtcgattgttgt

SEQ ID NO: 1539 - DNA, 50 bp, Homo sapiens
attccaaacgggatctgctgagacctcacagaggtgggccgcgattataa

SEQ ID NO: 1540 - DNA, 50 bp, Homo sapiens
cctagggtgaaacacgtgacagaagaataaagactattgaatagtcctct

SEQ ID NO: 1541 - DNA, 50 bp, Homo sapiens; identical to SEQ ID NO: 1315

SEQ ID NO: 1542 - DNA, 50 bp, Homo sapiens
ccccttgtttactctgtctgtatgtatgtcaaaagcgtggcaaaacctct

SEQ ID NO: 1543 - DNA, 50 bp, Homo sapiens
catgatctcagaggaaactgtcgctgaccctggacatgggtacgtttgac

SEQ ID NO: 1544 - DNA, 50 bp, Homo sapiens
cctctacctgcacgacaatacataatgacccaccaatcacatgcctatca

SEQ ID NO: 1545 - DNA, 50 bp, Homo sapiens
atttggaagcgccaccctagcaaatatacaaaccattaaaccttccctct

SEQ ID NO: 1546 - DNA, 50 bp, Homo sapiens
tttaccaatgattttcaggtgacctgggctaagtcatttaaactgggtct

SEQ ID NO: 1547 - DNA, 50 bp, Homo sapiens
agtttacatatcgacagcatatccactgatttctaaatgggctggtccca

SEQ ID NO: 1548 - DNA, 50 bp, Homo sapiens
atctggagtgggacccttcaaaccatgtctgtgcttatgcgggaaacaat

SEQ ID NO: 1549 - DNA, 50 bp, Homo sapiens
gcggagagaagaagaggtagatatgagaacagtgtgtggtatatgatagt

SEQ ID NO: 1550 - DNA, 50 bp, Homo sapiens
gaaatcccaccggcaagttaaggtcacggagcaagtgaataaacgcggag

SEQ ID NO: 1551 - DNA, 50 bp, Homo sapiens
gtgatcaaacaaattcacagcacagacaccgcgcaacaacgcaacttctc

SEQ ID NO: 1552 - DNA, 50 bp, Homo sapiens
ggtatttgtgttgttgagtattgtgtctgggtgtgggtatttgattcttt

SEQ ID NO: 1553 - DNA, 50 bp, Homo sapiens
gggttcgtccagggctgcgctaaattattctcaatgatttgtctctttgc

SEQ ID NO: 1554 - DNA, 50 bp, Homo sapiens
caatgacgcagtcggaccctcggatccaagtcctgctttgggtgtggacc

SEQ ID NO: 1555 - DNA, 50 bp, Homo sapiens
gggttataatagatggacgggtctttcacggtggtgacagcaccctttcc

SEQ ID NO: 1556 - DNA, 50 bp, Homo sapiens
tccgctgcaatttgagtttagctttacagattgtgccgggtgtttaacct

SEQ ID NO: 1557 - DNA, 50 bp, Homo sapiens
ctccttcccaaagacttgagtggaacttccctttcatgtgcgtatcggtc

SEQ ID NO: 1558 - DNA, 50 bp, Homo sapiens
aaattagtcgccttcgtcgagagtgcccttctgatgaatgtggtgctggg

SEQ ID NO: 1559 - DNA, 50 bp, Homo sapiens
gacagtactcctaagacccctgtgtgtgtcccgatgagatcatgactggg

SEQ ID NO: 1560 - DNA, 50 bp, Homo sapiens
catgcccatcgtcctagaattaattcccctaaaaatctttgaaatagggc

SEQ ID NO: 1561 - DNA, 50 bp, Homo sapiens
ggcgtatcatcaactggtgagcccgaagggatattatttctaaggcctct

SEQ ID NO: 1562 - DNA, 50 bp, Homo sapiens
ccagaatcgtaagggggctgacggaggatgagagggggcacccagagatc

SEQ ID NO: 1563 - DNA, 50 bp, Homo sapiens
cggtgttttctgatcggtttttgttttctgcttacatatgatgtacttgt

SEQ ID NO: 1564 - DNA, 50 bp, Homo sapiens
acagaatgcagcggtgcaacaccggcaaggttccacacgccacaaagaaa

SEQ ID NO: 1565 - DNA, 50 bp, Homo sapiens
tggaagtgaagtctatgatgtgaaacactttgcctcctgtgtactgtgtc

SEQ ID NO: 1566 - DNA, 50 bp, Homo sapiens
ccaaaaagcttcatttttctatataggctgcacaagagccttgattgaag

SEQ ID NO: 1567 - DNA, 50 bp, Homo sapiens
tcacaagacagtcatcagaaccagtaaatatccgtctgccagttcgatca

SEQ ID NO: 1568 - DNA, 50 bp, Homo sapiens; identical to SEQ ID NO: 1567

SEQ ID NO: 1569 - DNA, 50 bp, Homo sapiens
gctgtcatttgtacatttaaagcagctgttttggggtctgtgagagtaca

SEQ ID NO: 1570 - DNA, 50 bp, Homo sapiens
tatcctgagtcccttaatcttatggggccggaaggaatgtcagggccagg

SEQ ID NO: 1571 - DNA, 50 bp, Homo sapiens
ctctgccttcggagggaaattgtaaatcctgtgtttcattacttgaatgt

SEQ ID NO: 1572 - DNA, 50 bp, Homo sapiens
aaactcctgcttaaggtgttctaattttctgtgagcacactaaaagcgaa

SEQ ID NO: 1573 - DNA, 50 bp, Homo sapiens
gggtgcacgttcctcctggttccttcgcttgtgtttctgtacttaccaaa

SEQ ID NO: 1574 - DNA, 50 bp, Homo sapiens
ggggttgggaggaagtgtctactaggagggtgggtgagatctgtgttgat

SEQ ID NO: 1575 - DNA, 50 bp, Homo sapiens
atctaccctccgattgttcctgaaccgatgagaaataaagtttctgttga

SEQ ID NO: 1576 - DNA, 50 bp, Homo sapiens
aagtcttatgccaaattcagtgctactcctcgttacatgacatacaactg

SEQ ID NO: 1577 - DNA, 50 bp, Homo sapiens
cacacggaggcatctgcaccctcgatgaagcccaataaacctcttttctc

SEQ ID NO: 1578 - DNA, 50 bp, Homo sapiens
acaacgtcgtgactgggaaaaccctggcgttacccaacttaatcgccttg

SEQ ID NO: 1579 - DNA, 50 bp, Homo sapiens
ccaagcctccaagtgggaagaaagactgggatgatgaccaaaatgattga

SEQ ID NO: 1580 - DNA, 50 bp, Homo sapiens
caactacttgtggcatgcattggcactcggaataaagcgcactattgtca

SEQ ID NO: 1581 - DNA, 50 bp, Homo sapiens
gaaggggtagggtccaccatactggtaattggggtactctgtatatgtgt

SEQ ID NO: 1582 - DNA, 50 bp, Homo sapiens
gctcagttccatatttcatccgtgaaaaacttgcaatacgagcagtttca

SEQ ID NO: 1583 - DNA, 50 bp, Homo sapiens
aattgtcatttacctgggtatgaattccctgacacacattcatgtcaaca

SEQ ID NO: 1584 - DNA, 50 bp, Homo sapiens
gtgacttgactgtggaagatgatggttgcatgtttctagtttgtatatgt

SEQ ID NO: 1585 - DNA, 50 bp, Homo sapiens
cagtgctgtaatacagacggcaatgcaatagcctatttaaagaactacgt

SEQ ID NO: 1586 - DNA, 50 bp, Homo sapiens
agctggtggatggtgacttttgaagaacaaaaggctttggcaacagaaaa

SEQ ID NO: 1587 - DNA, 50 bp, Homo sapiens
tctgttgtcactaaagactaaatgagggtttgcagttgggaaagaggtca

SEQ ID NO: 1588 - DNA, 50 bp, Homo sapiens
gcggagttgaccaaaataatatctgaggatgattgcttttccctgctgcc

SEQ ID NO: 1589 - DNA, 50 bp, Homo sapiens
catcttgaacttggcctgagaacattttctgggaagaggtaagggtgaca

SEQ ID NO: 1590 - DNA, 50 bp, Homo sapiens
tctgtggaatctccttcattggcattgttatttaatcataaacggggcag

SEQ ID NO: 1591 - DNA, 50 bp, Homo sapiens
tgtactgttcatgctgacacagatatttcagtctgcatggtaaaagttct

SEQ ID NO: 1592 - DNA, 50 bp, Homo sapiens
taatggggtttatatggactttcttctcataaatggcctgccgtctccct

SEQ ID NO: 1593 - DNA, 50 bp, Homo sapiens; identical to SEQ ID NO: 1438

SEQ ID NO: 1594 - DNA, 50 bp, Homo sapiens
agtcctgtgtgcttccctctcttatgactgtgtccctggttgtcaataaa

SEQ ID NO: 1595 - DNA, 50 bp, Homo sapiens
acccaccacctcttgcactctcgcttttggagcaagttgcattaactatt

SEQ ID NO: 1596 - DNA, 50 bp, Homo sapiens
tgacagttgcagaattgtggagtgtttttacattgatcttttgctaatgc

SEQ ID NO: 1597 - DNA, 50 bp, Homo sapiens
atgacagacacacgtatctaacaaacaaacaaacagtgaccttctccatg

SEQ ID NO: 1598 - DNA, 50 bp, Homo sapiens
gcaagggataatacaaatcctatgatctctatgcccaatatgctgcctca

SEQ ID NO: 1599 - DNA, 50 bp, Homo sapiens
agtacttttcacagcgtggcctttcaccataattttatatttctccccct

SEQ ID NO: 1600 - DNA, 50 bp, Homo sapiens
tcttaagagccagagccatataagcatcttgggaaagcaagtttgaacca

SEQ ID NO: 1601 - DNA, 50 bp, Homo sapiens
aagccggtcatgagattatatgtggtaaagttaattgactaacaacccca

SEQ ID NO: 1602 - DNA, 50 bp, Homo sapiens
agggggctgtgtctgatcttggtgttcaaaacagaactgtatttttgcct

SEQ ID NO: 1603 - DNA, 50 bp, Homo sapiens
gttcatagcttcctgcaacttgacagagcctgagtttgcctcttagtggg

SEQ ID NO: 1604 - DNA, 50 bp, Homo sapiens
catatgggagaagggggagtaatgacttgtacaaacagtatttctggtgt

SEQ ID NO: 1605 - DNA, 50 bp, Homo sapiens
acatgtgatgtttgactgtaccattgactgttatggaagttcagcgttgt

SEQ ID NO: 1606 - DNA, 50 bp, Homo sapiens
tcttgcttttattcctttttgttgttggccttgtgctgcgtttgtttaca

SEQ ID NO: 1607 - DNA, 50 bp, Homo sapiens
agtgttgttttctcctctttaatattgctgtgaacagtggtgcccattgt

SEQ ID NO: 1608 - DNA, 50 bp, Homo sapiens
aattcttgtgtgctgctttccatttgacaccgcagttctgttcagccatc

SEQ ID NO: 1609 - DNA, 50 bp, Homo sapiens
gaggtgtctccatctctgcctcaacttcatggtgcactgagctgtaactt

SEQ ID NO: 1610 - DNA, 50 bp, Homo sapiens; identical to SEQ ID NO: 276

SEQ ID NO: 1611 - DNA, 50 bp, Homo sapiens
tattttcttccattcttgtcattggtcaataggggagggtagattagctg

SEQ ID NO: 1612 - DNA, 50 bp, Homo sapiens
tcccctgcttccactaaatccagttgtgacaaaatctaacgtgacatcag

SEQ ID NO: 1613 - DNA, 50 bp, Homo sapiens
acctggtcaacttagcttttaagcagacgatgctgtaaaaactaacggct

SEQ ID NO: 1614 - DNA, 50 bp, Homo sapiens
acctgggatgcccctgctctggacctctcatttctcttcattggtttatt

SEQ ID NO: 1615 - DNA, 50 bp, Homo sapiens
atctatccttgccagccttgggcatcacatttaccagtttaatagattgt

SEQ ID NO: 1616 - DNA, 50 bp, Homo sapiens
gccctgatctggagttacctgaggccatagctgccctattcacttctaag

SEQ ID NO: 1617 - DNA, 50 bp, Homo sapiens
cttgaccaaacccacagcctgtctcttctcttgtttagttacttacggca

SEQ ID NO: 1618 - DNA, 50 bp, Homo sapiens
ccttagaagaggaagcaaaggcagattcagggaccaaaaggattaatgat

SEQ ID NO: 1619 - DNA, 50 bp, Homo sapiens
atgtgtcaaccaccatttcagctattaaaaactcctgttatctccttgtt

SEQ ID NO: 1620 - DNA, 50 bp, Homo sapiens
agccaccagagccttcctctctttgtaccacagtttcttctgtaaatcca

SEQ ID NO: 1621 - DNA, 50 bp, Homo sapiens
acatgaaatatagttgcatatatggacaccgacttgggaggacaggtcct

SEQ ID NO: 1622 - DNA, 50 bp, Homo sapiens
ctttccagcctcctgctgggctctctcttcctaccctccttccacatgta

SEQ ID NO: 1623 - DNA, 50 bp, Homo sapiens
agatagccagcctagaggtatggctgtaactatctctgtgaagtgtgaga

SEQ ID NO: 1624 - DNA, 50 bp, Homo sapiens
tggcatcctcaggggttgtgatccagctccatatattgtttaccttcaaa

SEQ ID NO: 1625 - DNA, 50 bp, Homo sapiens
catgaggagagtgctagttcatgtgttctccattcttgtgagcatcctaa

SEQ ID NO: 1626 - DNA, 50 bp, Homo sapiens
cagcaaatccatctgaactgtggaggagaagctctctttactgagggtgc

SEQ ID NO: 1627 - DNA, 50 bp, Homo sapiens
tcagcataaactggaatgtagtgtcagaggatactgtggcttgttttgtt

SEQ ID NO: 1628 - DNA, 50 bp, Homo sapiens
tggtgaaacaaaaccagtcattagaaatggtctgtgcttttattttccca

SEQ ID NO: 1629 - DNA, 50 bp, Homo sapiens
actatgctttattggtcccatgttttgtgcaattttaaagagatggcttt

SEQ ID NO: 1630 - DNA, 50 bp, Homo sapiens
aaagatgaactatttggtctcattgaagccaacacagaacttgctgctgt

SEQ ID NO: 1631 - DNA, 50 bp, Homo sapiens
ggagcccctctttctcccatgctgcacttactccttttgctaataaaagt

SEQ ID NO: 1632 - DNA, 50 bp, Homo sapiens
ccttccatgtcccaccccactcccaccaaaaagtacaaaatcaggatgtt

SEQ ID NO: 1633 - DNA, 50 bp, Homo sapiens
tgatggtaaccataatggaagagattctggctagtgtctatcagaggtga

SEQ ID NO: 1634 - DNA, 50 bp, Homo sapiens
gtcctggtggtatcttcaatagccactaaccctgcctggtacagtatggg

SEQ ID NO: 1635 - DNA, 50 bp, Homo sapiens
cccagctctgctgcccttgttttgctgcatgttaaataaaaccattttca

SEQ ID NO: 1636 - DNA, 50 bp, Homo sapiens
cccacactgctacacttctgatcccctttggttttactacccaaatctaa

SEQ ID NO: 1637 - DNA, 50 bp, Homo sapiens
ctgtaatacctcctcctaaccaagccggatatggtatggcaagttaccaa

SEQ ID NO: 1638 - DNA, 50 bp, Homo sapiens
cccttgtaagggaattctggggcagctatggtttgagtatgcagtttgca

SEQ ID NO: 1639 - DNA, 50 bp, Homo sapiens
acaatctctgtccagcacctcttggttaaataatgtatgctgtgagacat

SEQ ID NO: 1640 - DNA, 50 bp, Homo sapiens
acagggcctcagcaagggagccatacatttttgtaacattttgatatgtt

SEQ ID NO: 1641 - DNA, 50 bp, Homo sapiens
ttgactgtcgatggattgtggtgtggtgtatctgaaggctattgaatgca

SEQ ID NO: 1642 - DNA, 50 bp, Homo sapiens
ttctgttccaaacaagtattctgtagatccaaatggattaccagtgtgct

SEQ ID NO: 1643 - DNA, 50 bp, Homo sapiens
atcttcagaatcagttaggttcctcactgcaagaaataaaatgtcaggca

SEQ ID NO: 1644 - DNA, 50 bp, Homo sapiens
tgaaccttactgcaaaaacttgtgatgtaagaaatttgtatggtgtggca

SEQ ID NO: 1645 - DNA, 50 bp, Homo sapiens
gctgtctcaagggtatccgtacctcaatgtcagttacattcagcagaaaa

SEQ ID NO: 1646 - DNA, 50 bp, Homo sapiens
ttggtcagatttagaagcattcatgctcacaagttttgggaaagtgaaaa

SEQ ID NO: 1647 - DNA, 50 bp, Homo sapiens
ccctaaaggcaagaagaaaaagtaaaagaccttggctcatagaaagtcac

SEQ ID NO: 1648 - DNA, 50 bp, Homo sapiens
gtgtgtgcatggaagatgcctgggctgtctttgctatatgtaaatagagc

SEQ ID NO: 1649 - DNA, 50 bp, Homo sapiens
gccttggctttatttgcaggctactaaagctgcttttactttgtaacttt

SEQ ID NO: 1650 - DNA, 50 bp, Homo sapiens
acagtttggttacaggacttctgtgcattgtaaacataaacagcatggaa

SEQ ID NO: 1651 - DNA, 50 bp, Homo sapiens
tgtgaaagtgtggaatggaagaaatgtcgatcctgttgtaactgattgtg

SEQ ID NO: 1652 - DNA, 50 bp, Homo sapiens
acaaccaaccagtttcttttctagccaatcatctctgaagagttgctgtt

SEQ ID NO: 1653 - DNA, 50 bp, Homo sapiens
gaactccctgattctataccctcttccttctttctgcaaggcagaggaat

SEQ ID NO: 1654 - DNA, 50 bp, Homo sapiens
caccctcagctccaccctcagcagatgataatatcaagacacctgccgag

SEQ ID NO: 1655 - DNA, 50 bp, Homo sapiens
ttggccctcaggtttactgtgtaaatctgcatttttggtggtaaatccct

SEQ ID NO: 1656 - DNA, 50 bp, Homo sapiens
gcatttccatagcactgaagtaccagtttccattcctgggctgagattgt

SEQ ID NO: 1657 - DNA, 50 bp, Homo sapiens
ctccttttaacgtgttattgacaaacctccccaaaagaatatgcaattgt

SEQ ID NO: 1658 - DNA, 50 bp, Homo sapiens
aacattcagttgagaccatatgcattttctgtgctgtttgtacttgaggt

SEQ ID NO: 1659 - DNA, 50 bp, Homo sapiens
ttaaccctcagagaactctgcattttagggtacttgaggctgacttaact

SEQ ID NO: 1660 - DNA, 50 bp, Homo sapiens
agcgacctcttctctagtccggtgttacgaacagaagttctgagttgtgc

SEQ ID NO: 1661 - DNA, 50 bp, Homo sapiens
taaatgtcggtccaggccctgtgcaccttaccccagagacagactctttt

SEQ ID NO: 1662 - DNA, 50 bp, Homo sapiens
ataaggctgtaaaatgagaattctgccccctcacctcttaccccagtact

SEQ ID NO: 1663 - DNA, 50 bp, Homo sapiens
aaaagtcggggatcggggcaagagaggctgagtacggatgggaaactatt

SEQ ID NO: 1664 - DNA, 50 bp, Homo sapiens
gagcacccagagggatttttcagtgggaagcattacactttgctaaatca

SEQ ID NO: 1665 - DNA, 50 bp, Homo sapiens
tgattaggtgacgagttgacattgagattgtccttttcccctgatcaaaa

SEQ ID NO: 1666 - DNA, 50 bp, Homo sapiens
tgtatgtatgggagtgaggagtttcagggccattgcaaacatagctgtgc

SEQ ID NO: 1667 - DNA, 50 bp, Homo sapiens
acagagttatccactttacaacggagacacagttctggaacattgaaact

SEQ ID NO: 1668 - DNA, 50 bp, Homo sapiens
atacgggacaataaaatctgccttttgctctggagggagatactacctct

SEQ ID NO: 1669 - DNA, 50 bp, Homo sapiens
gggcaaacaactttaggaatactagttactcacttaacatggagggcggg

SEQ ID NO: 1670 - DNA, 50 bp, Homo sapiens
aaaggccgcgcagattgtttaattctggaaagtcaatccccggatttagc

SEQ ID NO: 1671 - DNA, 50 bp, Homo sapiens
gggactccatgggaatatttgcccagtaatggtaaggaaatctttcgggt

SEQ ID NO: 1672 - DNA, 50 bp, Homo sapiens
ccagaaaggtgatgaatgaataggactgagagtcacagtgaatgtggcat

SEQ ID NO: 1673 - DNA, 50 bp, Homo sapiens
tcccaaggttgttagtgactgataagcttccaaactacagtacagttttt

SEQ ID NO: 1674 - DNA, 50 bp, Homo sapiens
gttttcttgtagttgcgggtccctcgcgaaagttcattcatggccccact

SEQ ID NO: 1675 - DNA, 50 bp, Homo sapiens
catggggctctcttgtgtacttattgtttaaggtttcctcaaactgtgat

SEQ ID NO: 1676 - DNA, 50 bp, Homo sapiens
acaaattgaaatgtctgtactgatcctcaaccaataaaatctcagccgaa

SEQ ID NO: 1677 - DNA, 50 bp, Homo sapiens
tgcaggagacattggtattctgggcagcttcctaatatgctttacaatct

SEQ ID NO: 1678 - DNA, 50 bp, Homo sapiens; identical to SEQ ID NO: 33

SEQ ID NO: 1679 - DNA, 50 bp, Homo sapiens
ggcattgttagtttagtgtgtgtgcagagtccatttcccacatctttcct

SEQ ID NO: 1680 - DNA, 50 bp, Homo sapiens
gactgcaatgctggtggggaaagacttaaaagtggattaaagacctgcgt

SEQ ID NO: 1681 - DNA, 50 bp, Homo sapiens
gctttccttctccaggaatactgaacatgggagctcttgaaatatgtagt

SEQ ID NO: 1682 - DNA, 50 bp, Homo sapiens
tgggaatcaagatttaatcctagagatttggtgtacaattcaggctttgg

SEQ ID NO: 1683 - DNA, 50 bp, Homo sapiens
gcagtagtgtggactagaacaacccaaatagcatctagaaagccatgagt

SEQ ID NO: 1684 - DNA, 50 bp, Homo sapiens
tgtgtaatgtacctgtcagtgcctcctttattaaggggttctttgagaat

SEQ ID NO: 1685 - DNA, 50 bp, Homo sapiens
ccactgtcactgtttctctgctgttgcaaatacatggataacacatttga

SEQ ID NO: 1686 - DNA, 50 bp, Homo sapiens
agtttgccctggatgtcatattggcagttggaggacacagtttctattgt

SEQ ID NO: 1687 - DNA, 50 bp, Homo sapiens
ccaagttccacattccttctagcgtgccttacatcaggtactttgtcagc

SEQ ID NO: 1688 - DNA, 50 bp, Homo sapiens
agctgtctcctgttttgtaagctttcagtgcaacatttcttggttccaat

SEQ ID NO: 1689 - DNA, 50 bp, Homo sapiens
tgcatgttggggtttcctttaccttttctataagttgtaccaaaacatcc

SEQ ID NO: 1690 - DNA, 50 bp, Homo sapiens
gggtttgtgctatacactgggatgtctaattgcagcaataaagcctttct

SEQ ID NO: 1691 - DNA, 50 bp, Homo sapiens
gccacacttattcttttcagtaacctgctagtgcacaggctgtactttag

SEQ ID NO: 1692 - DNA, 50 bp, Homo sapiens
cagtcgaaggctttaactttgcacacttgggatcacagttgcgtcattgt

SEQ ID NO: 1693 - DNA, 50 bp, Homo sapiens
ttccctttccccagcatcactccccaaggaagagccaatgttttccaccc

SEQ ID NO: 1694 - DNA, 50 bp, Homo sapiens
agccataatgtaaactgcctcaaattggactttgggcataaaagaacttt

SEQ ID NO: 1695 - DNA, 50 bp, Homo sapiens
ttgcttttactagtcttagctctacgatttaaatccatgtgtccaagggg

SEQ ID NO: 1696 - DNA, 50 bp, Homo sapiens
cacacctgcacactcacggctgaaatctccctaacccagggggaccttag

SEQ ID NO: 1697 - DNA, 50 bp, Homo sapiens
agctgtaacgttcgcgttaggaaagatggtgtttattccagtttgcattt

SEQ ID NO: 1698 - DNA, 50 bp, Homo sapiens
aggggttccactagtgtctgctttcctttattattgcactgtgtgaggtt

SEQ ID NO: 1699 - DNA, 50 bp, Homo sapiens
catcctcaggtggtcaggcgtagatcaccagaataaacccagcttccctc

SEQ ID NO: 1700 - DNA, 50 bp, Homo sapiens
acacacaacgtgaaaaataggaacaggaacaaaaagaagaccaatgactc

SEQ ID NO: 1701 - DNA, 50 bp, Homo sapiens
tttagagtcttccattttgttggaattagatcctccccttcaaatgctgt

SEQ ID NO: 1702 - DNA, 50 bp, Homo sapiens
ctaatttcagtgcttgtgcttggttgttcagggccatttcaggtttgggt

SEQ ID NO: 1703 - DNA, 50 bp, Homo sapiens; identical to SEQ ID NO: 206

SEQ ID NO: 1704 - DNA, 50 bp, Homo sapiens; identical to SEQ ID NO: 818

SEQ ID NO: 1705 - DNA, 50 bp, Homo sapiens
aggtggtgttcagtgtcagacctcttaatggccagtgaataacactcact

SEQ ID NO: 1706 - DNA, 50 bp, Homo sapiens
gggggtagtttgtggcaggacaagagaaggcattgagctttttctttcat

SEQ ID NO: 1707 - DNA, 50 bp, Homo sapiens
tcgttaagagagcaacattttacccacacacagataaagttttcccttga

SEQ ID NO: 1708 - DNA, 50 bp, Homo sapiens; identical to SEQ ID NO: 86

SEQ ID NO: 1709 - DNA, 50 bp, Homo sapiens
aaacaaggtaggaatgaggctagacctttaacttccctaaggcatacttt

SEQ ID NO: 1710 - DNA, 50 bp, Homo sapiens
ttccccatatccaagtaccaatgctgttgtaaacaacgtgtatagtgcct

SEQ ID NO: 1711 - DNA, 50 bp, Homo sapiens
tgagcctttcacacctgtgctggcgctggaaaattatttgtgctcagctg

SEQ ID NO: 1712 - DNA, 50 bp, Homo sapiens
tgggattgtactataccagtaagtgccacttctgtgtctttctaatggaa

SEQ ID NO: 1713 - DNA, 50 bp, Homo sapiens
tttttcctcacaggagcggaagaactagggggagcaggagctgcaatgcg

SEQ ID NO: 1714 - DNA, 50 bp, Homo sapiens
tctacccatttcctgaggcctgtggaaataaacctttatgtacttaaagt

SEQ ID NO: 1715 - DNA, 50 bp, Homo sapiens
gtgtccgttatgagtgccaaaaatctgtcttgaaggcagctacactttga

SEQ ID NO: 1716 - DNA, 50 bp, Homo sapiens
ctgtgcaatgctacatgtacgtggacttatatcagaccagtgtggatctt

SEQ ID NO: 1717 - DNA, 50 bp, Homo sapiens
agtcccctgtcctggtcatctatcaagataacaagcggccctcagggatc

SEQ ID NO: 1718 - DNA, 50 bp, Homo sapiens
gggtctatgtgaaaatgcccccaacagagccagaatgtgaaaagcaattt

SEQ ID NO: 1719 - DNA, 50 bp, Homo sapiens
cttgccttaagctaccagattgcttttgccaccattggccatactgtgtg

SEQ ID NO: 1720 - DNA, 50 bp, Homo sapiens
cccctgccagagggagttcttcttttgtgagagacactgtaaacgacaca

SEQ ID NO: 1721 - DNA, 50 bp, Homo sapiens
tgcagccactattgttagtctcttgattcataatgacttaagcacacttg

SEQ ID NO: 1722 - DNA, 50 bp, Homo sapiens
tgactattactgtcaggcgtgggacaccaacactgcggtattcggcggag

SEQ ID NO: 1723 - DNA, 50 bp, Homo sapiens
tttgagacgcaataccaatacttaggattttggtcttggtgtttgtatga

SEQ ID NO: 1724 - DNA, 50 bp, Homo sapiens
tccttccagggcttctttgtgtctgtgttctactgtttcctcaatagtga

SEQ ID NO: 1725 - DNA, 50 bp, Homo sapiens
ccatgtccatccccacctccccaacccgtgtcagctttcacagcatcaag

SEQ ID NO: 1726 - DNA, 50 bp, Homo sapiens
tgccctcaagtaaaagaaaagccgaaagggttaatcatatttgaaaacca

SEQ ID NO: 1727 - DNA, 50 bp, Homo sapiens
atgctacttgggagaaaactctcactaactgtctcaccgggtttcaaagc

SEQ ID NO: 1728 - DNA, 50 bp, Homo sapiens
ggactttgcgaatatcagagacctcagactcttcacagggtcaggactca

SEQ ID NO: 1729 - DNA, 50 bp, Homo sapiens
agctccctgcaagtcacatttcccagtgaaacactgaacttatcagaaaa

SEQ ID NO: 1730 - DNA, 50 bp, Homo sapiens
ttccttcaggatgatctagagcagcatggagctgttggtagaatattagt

SEQ ID NO: 1731 - DNA, 50 bp, Homo sapiens
ggggaggaaggaaggacattaaattctttccctggtaatgaaaagagccc

SEQ ID NO: 1732 - DNA, 50 bp, Homo sapiens
gccttgtacataatactattccatccacacagtttccaccctcacctgcc

SEQ ID NO: 1733 - DNA, 50 bp, Homo sapiens
agcaagatagccaaatgtgacatcaagctccattgtttcggaaatccagg

SEQ ID NO: 1734 - DNA, 50 bp, Homo sapiens
gccgagtgaggtaaccaggtggcatctaccccatgttttataaggaattt

SEQ ID NO: 1735 - DNA, 50 bp, Homo sapiens
ttctttccatttgctatcatgtcagtgaacgccaggagtgctttctttgc

SEQ ID NO: 1736 - DNA, 50 bp, Homo sapiens
tgaatttacttcctcccaagagtttggactgcccgtcagattgtttctgc

SEQ ID NO: 1737 - DNA, 50 bp, Homo sapiens
accctcatttccagggggagcctcaggccccgagataaatgtgctccatg

SEQ ID NO: 1738 - DNA, 50 bp, Homo sapiens
ttctctgagggctgggggttgggggagtcagcatgattatattttaatgt

SEQ ID NO: 1739 - DNA, 50 bp, Homo sapiens
acttggctgtaatcagttatgccgtataggatgtcagacaataccactgg

SEQ ID NO: 1740 - DNA, 50 bp, Homo sapiens
tggagctcagtaacataactgcttcttggagctttggaatattttatcct

SEQ ID NO: 1741 - DNA, 50 bp, Homo sapiens
aaatttcacaagcaatactttggaccactggggttcaggccccaagaaat

SEQ ID NO: 1742 - DNA, 50 bp, Homo sapiens
acacacaaaacagcaaacttcaggtaactattttggattgcaaacaggat

SEQ ID NO: 1743 - DNA, 50 bp, Homo sapiens
tcttgccttaattaacattccctgtgacctagttggtgcagtggcttgaa

SEQ ID NO: 1744 - DNA, 50 bp, Homo sapiens
acttgcagttgtgtggaaaactgttttgtaatgaaagatcttcattgggg

SEQ ID NO: 1745 - DNA, 50 bp, Homo sapiens
tgtgatctctactactgttgattttgccctcggagcaaactgaataaagc

SEQ ID NO: 1746 - DNA, 50 bp, Homo sapiens
taggaaatgtttgacatctgaagctctcttcacactcccgtggcactcct

SEQ ID NO: 1747 - DNA, 50 bp, Homo sapiens
cgtcccctctccccttggttctgcactgttgccaataaaaagctcttaaa

SEQ ID NO: 1748 - DNA, 50 bp, Homo sapiens
gggagtgttgtgactgaaatgcttgaaaccaaagcttcagataaacttgc

SEQ ID NO: 1749 - DNA, 50 bp, Homo sapiens
aggggacagaaatcaggtattggcagtttttccattttcatttgtgtgtg

SEQ ID NO: 1750 - DNA, 50 bp, Homo sapiens
agccgcccagctacctaattcctcagtaacatcgatctaaaatctccatg

SEQ ID NO: 1751 - DNA, 50 bp, Homo sapiens
acatgcaagtacatgtttttaatgttgtctgtcttctgtgctgttcctgt

SEQ ID NO: 1752 - DNA, 50 bp, Homo sapiens
cctgtgtgggactgagatgcaggatttcttcacacctctcctttgtgact

SEQ ID NO: 1753 - DNA, 50 bp, Homo sapiens
ggcatctgaatgtgtctgcgttcctgttagcataatgtgaggaggtggag

SEQ ID NO: 1754 - DNA, 50 bp, Homo sapiens
ctgagagcccaaactgctgtcccaaacatgcacttccttgcttaaggtat

SEQ ID NO: 1755 - DNA, 50 bp, Homo sapiens
aagctccctggagccctgttggcagctctagcttttgcagtcgtgtaatg

SEQ ID NO: 1756 - DNA, 50 bp, Homo sapiens
agccctctttctctccacccaatgctgctttctcctgttcatcctgatgg

SEQ ID NO: 1757 - DNA, 50 bp, Homo sapiens
tccacaggggtggtgtcaaatgctattgaaattgtgttgaattgtatgct

SEQ ID NO: 1758 - DNA, 50 bp, Homo sapiens; identical to SEQ ID NO: 1465

SEQ ID NO: 1759 - DNA, 50 bp, Homo sapiens
gacttccacagcagcagaacaagtgcctcctggactgttcacggcagacc

SEQ ID NO: 1760 - DNA, 50 bp, Homo sapiens
tatccccagctcaggtggtgagtcctcctgtccagcctgcatcaataaaa

SEQ ID NO: 1761 - DNA, 50 bp, Homo sapiens
ctgggttttgtggtcatctattctagcagggaacactaaaggtggaaata

SEQ ID NO: 1762 - DNA, 50 bp, Homo sapiens
agctatggaatcaattcaatttggactggtgtgctctctttaaatcaagt

SEQ ID NO: 1763 - DNA, 50 bp, Homo sapiens
tggctcaagtagaaaagcagtcccattcatattaagacagtgtacaaaac

SEQ ID NO: 1764 - DNA, 50 bp, Homo sapiens
agctcttgaaagcagctttgagttagaagtatgtgtgttacaccctcaca

SEQ ID NO: 1765 - DNA, 50 bp, Homo sapiens
aaccggatatatacatagcatgacatttctttgtgctttggcttacttgt

SEQ ID NO: 1766 - DNA, 50 bp, Homo sapiens; identical to SEQ ID NO: 270

SEQ ID NO: 1767 - DNA, 50 bp, Homo sapiens
aaagttgatactgtgggatttttgtgaacagcctgatgtttgggaccttt

SEQ ID NO: 1768 - DNA, 50 bp, Homo sapiens
cttccttagctcctgttcttggcctgaagcctcacagctttgatggcagt

SEQ ID NO: 1769 - DNA, 50 bp, Homo sapiens
tttgtgcttccctttacctaaactgtcctgcctcccatgcatctgtaccc

SEQ ID NO: 1770 - DNA, 50 bp, Homo sapiens; identical to SEQ ID NO: 1769

SEQ ID NO: 1771 - DNA, 50 bp, Homo sapiens
cttgtggcttcctcagctcctgcccttggcctgaagtcccagcattgatg

SEQ ID NO: 1772 - DNA, 50 bp, Homo sapiens
atttgtttgcatccctcccccacaccctggtgttttaaaatgaagaaaaa

SEQ ID NO: 1773 - DNA, 50 bp, Homo sapiens
catccgacataatcctacaggtgctgtgttattcatggggcagataaaca

SEQ ID NO: 1774 - DNA, 50 bp, Homo sapiens
agtggggtggggagcatgttcatttgtacctcgagttttaaactggttcc

SEQ ID NO: 1775 - DNA, 50 bp, Homo sapiens
cctaaaccgtatggcctcccgtgcatctgtattcaccctgtatgacaaac

SEQ ID NO: 1776 - DNA, 50 bp, Homo sapiens
tttcatctcaggcctccctcaaccccaccacttcttttataactagtcct

SEQ ID NO: 1777 - DNA, 50 bp, Homo sapiens
gcatggcttaacctggtgataaaagcagttattaaaagtctacgttttcc

SEQ ID NO: 1778 - DNA, 50 bp, Homo sapiens
agcttccgccgtctcaacccctcacaggagcttactggcaaacatgaaaa

SEQ ID NO: 1779 - DNA, 50 bp, Homo sapiens
tctcctccacctcaactccgtgcttaaccaaagaagctgtactccggggg

SEQ ID NO: 1780 - DNA, 50 bp, Homo sapiens
acccaagggacctggatttggtgtacaagcaggcctttaatttatattga

SEQ ID NO: 1781 - DNA, 50 bp, Homo sapiens
agctcctcttcctggcttcttactgaaaggttaccctgtaacatgcaatt

SEQ ID NO: 1782 - DNA, 50 bp, Homo sapiens; identical to SEQ ID NO: 194

SEQ ID NO: 1783 - DNA, 50 bp, Homo sapiens
ccaccccaaccttctggtggggagaaataaacggtttagagacagctctg

SEQ ID NO: 1784 - DNA, 50 bp, Homo sapiens
gccaagggccaagagaatatccgaactttaatttcaggaattgaatgggt

SEQ ID NO: 1785 - DNA, 50 bp, Homo sapiens; identical to SEQ ID NO: 150

SEQ ID NO: 1786 - DNA, 50 bp, Homo sapiens
ccggttgttaaaactggtttagcacaatttatattttccctctcttgcct

SEQ ID NO: 1787 - DNA, 50 bp, Homo sapiens
attaaagcaccaaattcatgtacagcatgcatcacggatcaatagactgt

SEQ ID NO: 1788 - DNA, 50 bp, Homo sapiens
tagccgtactttgctaactgtgctcctcacttcctcttcttcattgcagt

SEQ ID NO: 1789 - DNA, 50 bp, Homo sapiens
aggctaagctgccggttcttaaatccatcctgctaagttaatgttgggta

SEQ ID NO: 1790 - DNA, 50 bp, Homo sapiens
aatatatgcatccctggtgaaggatcttgcctgcatgaaacatgttctca

SEQ ID NO: 1791 - DNA, 50 bp, Homo sapiens
acctgggcattcttgtttcattcaattccacctgcaatcaagtcctacaa

SEQ ID NO: 1792 - DNA, 50 bp, Homo sapiens
ctccctcacagcacagagaagacaaaattagcaaaaccccactacacagt

SEQ ID NO: 1793 - DNA, 50 bp, Homo sapiens
gttcagtggcactcaacatgagtcaagagcatcctgcttctaccatgtgg

SEQ ID NO: 1794 - DNA, 50 bp, Homo sapiens
cttgagctagaagtctccaaggaggtcgggatggggcttgtagcagaagg

SEQ ID NO: 1795 - DNA, 50 bp, Homo sapiens
ctcccaactcctccctatcctaaaggcccactggcattaaagtgctgtat

SEQ ID NO: 1796 - DNA, 50 bp, Homo sapiens
tcggtcctctttccagtggatcataagacaatggaccctttttgttatga

SEQ ID NO: 1797 - DNA, 50 bp, Homo sapiens
aacacacagtgtttatgttggaatcttttggaactcctttgatctcactg

SEQ ID NO: 1798 - DNA, 50 bp, Homo sapiens
ggggctctttccctcatgtatacttcaagtaagatcaagaatcttttgtg

SEQ ID NO: 1799 - DNA, 50 bp, Homo sapiens
tcatcctctgtgtggctcatgtttttgcttttcaacacacaaagcacaaa

SEQ ID NO: 1800 - DNA, 50 bp, Homo sapiens
tggatgattgggactttaaaacgaccctctttcaggtggattcagagacc

SEQ ID NO: 1801 - DNA, 50 bp, Homo sapiens
tgtagcttctgaaaggtgctttctccatttatttaaaaactacccatgca

SEQ ID NO: 1802 - DNA, 50 bp, Homo sapiens
tgtagcaacatgagaaacgcttatgttacaggttacatgagagcaatcat

SEQ ID NO: 1803 - DNA, 50 bp, Homo sapiens
ctgatggctgtgaccctgcttcctgcactgacccagagcctctgcctgtg

SEQ ID NO: 1804 - DNA, 50 bp, Homo sapiens
tgtgtgttgatcccaagacaatgaaagtttgcactgtatgctggacggca

SEQ ID NO: 1805 - DNA, 50 bp, Homo sapiens
ctctcctcagactgctcaagagaagcacatgaaaaccattacctgacttt

SEQ ID NO: 1806 - DNA, 50 bp, Homo sapiens
gccagtaagatcaatgtgacggcagggaaatgtatgtgtgtctattttgt

SEQ ID NO: 1807 - DNA, 50 bp, Homo sapiens
gcaacaatgaagttaatggataccctctgcctttggctcagaaatgttat

SEQ ID NO: 1808 - DNA, 50 bp, Homo sapiens
tgtctttcggttatcaagtgtttctgcatggtaatgtcatgtaaatgctg

SEQ ID NO: 1809 - DNA, 50 bp, Homo sapiens
tatcatggggagtaataggaccagagcggtatctctggcaccacactagc

SEQ ID NO: 1810 - DNA, 50 bp, Homo sapiens
tgatcttggctgtatttaatggcataggctgacttttgcagatggaggaa

SEQ ID NO: 1811 - DNA, 50 bp, Homo sapiens
agtactgagaaaaatcccttcagctctaagaacactgaaaaatccaccga

SEQ ID NO: 1812 - DNA, 50 bp, Homo sapiens
actttgcacacatttgcatccacatattagggaaggaataagtagctgca

SEQ ID NO: 1813 - DNA, 50 bp, Homo sapiens
atgcagtgtttccctctgtgttagagcagagaggtttcgatatttattga

SEQ ID NO: 1814 - DNA, 50 bp, Homo sapiens
tgctgaagtttcccttagacattttatgtcttgcttgtagggcataatgc

SEQ ID NO: 1815 - DNA, 50 bp, Homo sapiens
cactggaccattgtcacaaccctctgtttctctttgactaagtgccctgg

SEQ ID NO: 1816 - DNA, 50 bp, Homo sapiens
aagtgttactgtggcttcaaagaagctattgattctgaagtagtgggttt

SEQ ID NO: 1817 - DNA, 50 bp, Homo sapiens
gctgcttatatatttaataataaaagaagtgcacaagctgccgttgacgt

SEQ ID NO: 1818 - DNA, 50 bp, Homo sapiens
aacaaacatttggttttgttcagaccttatttccactctggtggataagt

SEQ ID NO: 1819 - DNA, 50 bp, Homo sapiens
gagagagggcacgagaacccaaaggaatagagattctccaggaatttcct

SEQ ID NO: 1820 - DNA, 50 bp, Homo sapiens
ttcccagcatcagccttagaacaagaaccttaccttcaaggagcaagtga

SEQ ID NO: 1821 - DNA, 50 bp, Homo sapiens
ctgtccagctccctctccccaagaaacaacatgaatgagcaacttcagag

SEQ ID NO: 1822 - DNA, 50 bp, Homo sapiens
ctgtaacgacgagagcggcgaggatgtcgaggttccctatgtccgataca

SEQ ID NO: 1823 - DNA, 50 bp, Homo sapiens
acctagtcatcaggacactgagccagggctgcaaccactccatgagtttg

SEQ ID NO: 1824 - DNA, 50 bp, Homo sapiens
ccccaaccctctgggctcttggatttcagagtgaaaacttgatggcattg

SEQ ID NO: 1825 - DNA, 50 bp, Homo sapiens
tcaattcctctgggaatgttacattgtttgtctgtcttcatagcagattt

SEQ ID NO: 1826 - DNA, 50 bp, Homo sapiens
accagtttctttcccttctagatcaccctgttctgaagccagcctctctc

SEQ ID NO: 1827 - DNA, 50 bp, Homo sapiens
ctacctgaacccctcttgccactgccttctaccttgtttgaaacctgaat

SEQ ID NO: 1828 - DNA, 50 bp, Homo sapiens
aactcgagaccttttcaacttggcttcctttcttggttcataaatgaatt

SEQ ID NO: 1829 - DNA, 50 bp, Homo sapiens
agctgctgctggatcacagctgctttctgttgtcattgctgttgtccctc

SEQ ID NO: 1830 - DNA, 50 bp, Homo sapiens; identical to SEQ ID NO: 110

SEQ ID NO: 1831 - DNA, 50 bp, Homo sapiens
atccagccccacccaatggccttttgtgcttgtttcctataacttcagta

SEQ ID NO: 1832 - DNA, 50 bp, Homo sapiens
ccttctttgtatataggcttctcaccgcgaccaataaacagctcccagtt

SEQ ID NO: 1833 - DNA, 50 bp, Homo sapiens
aaaacgatgaaggtatgctgtcatggtcctttctggaagtttctggtgcc

SEQ ID NO: 1834 - DNA, 50 bp, Homo sapiens
aatgcgaaattattggttggtgtgaagaaagccagacaacttctgtttct

SEQ ID NO: 1835 - DNA, 50 bp, Homo sapiens
ctgtggctcgtttgagggattggggtggacctggggtttattttcagtaa

SEQ ID NO: 1836 - DNA, 50 bp, Homo sapiens
gcttccccaccccagtttttgttgcttgaaaatattgttgtcccggattt

SEQ ID NO: 1837 - DNA, 50 bp, Homo sapiens
tggactgttttgttgggcagtgcctgataagcttcaaagctgctttattc

SEQ ID NO: 1838 - DNA, 50 bp, Homo sapiens
cctgccgtgcccacctaactgtccagatgaggtttatcagcttatgagaa

SEQ ID NO: 1839 - DNA, 50 bp, Homo sapiens
cgagctgagaagcggtcatgagcacctggggattttagtaagtgtgtctt

SEQ ID NO: 1840 - DNA, 50 bp, Homo sapiens
accatccaatcggacaagctttcagaaccttattgaaggatttgaagcac

SEQ ID NO: 1841 - DNA, 50 bp, Homo sapiens
tgctgatgaacctgcagaaaaggctgatgaaccaatggaacattaagtga

SEQ ID NO: 1842 - DNA, 50 bp, Homo sapiens
tcttatgcacacggtgatttcatgttatatatgcaaagtaggcaactgtt

SEQ ID NO: 1843 - DNA, 50 bp, Homo sapiens
aacataggagtggattcctgccccaaccaaaccgcattcgtgtggatttt

SEQ ID NO: 1844 - DNA, 50 bp, Homo sapiens
aataaatttgcaaaaccaagatcacagtacaccatatgcactctggtacc

SEQ ID NO: 1845 - DNA, 50 bp, Homo sapiens
aaatgacctcatgttgtggtttaaacagcaactgcacccactagcacagc

SEQ ID NO: 1846 - DNA, 50 bp, Homo sapiens
tgtgcagtagaaacaaaagtaggctacagtctgtgccatgttgatgtaca

SEQ ID NO: 1847 - DNA, 50 bp, Homo sapiens
ctgtttattctgggaaatgttttaatgccagggcctgctgagttgcttct

SEQ ID NO: 1848 - DNA, 50 bp, Homo sapiens
ccttaagaccagttcatagttaatacaggtttacagttcatgcctgtggt

SEQ ID NO: 1849 - DNA, 50 bp, Homo sapiens
tcatcactttggacaggagttaattaagagaatgaccaagctcagttcaa

SEQ ID NO: 1850 - DNA, 50 bp, Homo sapiens
agtctgcctaaataggtagcttaaacttatgtcaaaatgtctgcagcagt

SEQ ID NO: 1851 - DNA, 50 bp, Homo sapiens
ctggcctccagtgccttcccccgtggaataaacggtgtgtcctgagaaac

SEQ ID NO: 1852 - DNA, 50 bp, Homo sapiens
agctaattaagctgcagaacgtgggaaataaagttcgaaacaaaggttaa

SEQ ID NO: 1853 - DNA, 50 bp, Homo sapiens
ggacaggtgtgccgacagaaggaaccagcgtgtatatgagggtatcaaat

SEQ ID NO: 1854 - DNA, 50 bp, Homo sapiens
cccttcgtggggctacacattctcttcctcatattttcatgcacacaagt

SEQ ID NO: 1855 - DNA, 50 bp, Homo sapiens
ttctgcacaggtctctgtttagtaaatacatcactgtataccgatcagga

SEQ ID NO: 1856 - DNA, 50 bp, Homo sapiens
caccctccaccccttccttttgcgcggaccccattacaataaattttaaa

SEQ ID NO: 1857 - DNA, 50 bp, Homo sapiens
catgcagctatttcaaagtgtgttggattaattaggatcatccctttggt

SEQ ID NO: 1858 - DNA, 50 bp, Homo sapiens
tggagaattgtggaaggattgtaacatggaccatccaaatttatggccgt

SEQ ID NO: 1859 - DNA, 50 bp, Homo sapiens
ttcacgggatgcaccaaagtgtgtaccccgtaagcatgaaaccagtgttt

SEQ ID NO: 1860 - DNA, 50 bp, Homo sapiens
tctgtccatcagtgcatgacgtttaaggccacgtatagtcctagctgacg

SEQ ID NO: 1861 - DNA, 50 bp, Homo sapiens
tcctataattatttctgtagcactccacactgatctttggaaacttgccc

SEQ ID NO: 1862 - DNA, 50 bp, Homo sapiens
gggacactggaggctggagctacagttgaaagcactgcatgttaagaggg

SEQ ID NO: 1863 - DNA, 50 bp, Homo sapiens
tgctaccacaactatattatcatgcaaatgctgtattcttctttggtgga

SEQ ID NO: 1864 - DNA, 50 bp, Homo sapiens
gcaacttacgcttggcatcttcagaatgcttttctagcattaagagatgt

SEQ ID NO: 1865 - DNA, 50 bp, Homo sapiens
tttacaagaattgtccatgtgcttccctaggctgagctggcattggtctg

SEQ ID NO: 1866 - DNA, 50 bp, Homo sapiens
aaaacttcccaccctacttttccaagagtgccagttggattctgaatctg

SEQ ID NO: 1867 - DNA, 50 bp, Homo sapiens
tagaccaattctctgatctcgagttgtttttgtttggatacagccctttt

SEQ ID NO: 1868 - DNA, 50 bp, Homo sapiens
aacattctacatagcacaggagcttaagagtggcattatcttctcgcctt

SEQ ID NO: 1869 - DNA, 50 bp, Homo sapiens
agatacgcagacattgtggcatctgggtagaagaatactgtattgtgtgt

SEQ ID NO: 1870 - DNA, 50 bp, Homo sapiens
tttgaccagaagcccttagtaagtacgtgcctgaaactgaaaccatgtgc

SEQ ID NO: 1871 - DNA, 50 bp, Homo sapiens
acacctggcttggagtcagatttagttaacaataatgagcctggagcagt

SEQ ID NO: 1872 - DNA, 50 bp, Homo sapiens
tctaatagcgggttactttcacatacagccctcccccagcagttgaatga

SEQ ID NO: 1873 - DNA, 50 bp, Homo sapiens
ctgaaaagtgctttgctggagtcctgttctctgagctccacagaagacac

SEQ ID NO: 1874 - DNA, 50 bp, Homo sapiens
aagcctaaagtgattcaatagcccaggagcacctgattcctttctgcctg

SEQ ID NO: 1875 - DNA, 50 bp, Homo sapiens
tgggcatggttgaatctgaaaccctccttctgtggcaacttgtactgaaa

SEQ ID NO: 1876 - DNA, 50 bp, Homo sapiens
ggggtggggtggggtgagagtgtgtggagtaaggacattcagaataaata

SEQ ID NO: 1877 - DNA, 50 bp, Homo sapiens
agaagttgtgcgcgtgctttctcagcagcatttttccttcaaaatcatct

SEQ ID NO: 1878 - DNA, 50 bp, Homo sapiens
cttgccagccaggagtgcggacaccatgttcccagctcagtgccaaagag

SEQ ID NO: 1879 - DNA, 50 bp, Homo sapiens
atttggggagagaaaacctttttaagcatggtggggcactcagataggag

SEQ ID NO: 1880 - DNA, 50 bp, Homo sapiens
accctctttcttgtttgtcagcatctgaccatctgtgactataaagctgt

SEQ ID NO: 1881 - DNA, 50 bp, Homo sapiens
tggtcatccaaactcaaacttgagaaaatatcttgctttcaaattgacac

SEQ ID NO: 1882 - DNA, 50 bp, Homo sapiens
accgaatttggcaagaatgaaatggtgtcataaagatgggaggggagggt

SEQ ID NO: 1883 - DNA, 50 bp, Homo sapiens
agcctgtgacattaagcattctcacaattagaaataagaataaaacccat

SEQ ID NO: 1884 - DNA, 50 bp, Homo sapiens
aaaaataaaaacaaatactgtgtttcagaagcgccacctattggggaaaa

SEQ ID NO: 1885 - DNA, 50 bp, Homo sapiens
ttatcacaagctctgttacctttatatacgctgcctcttcaatttggaaa

SEQ ID NO: 1886 - DNA, 50 bp, Homo sapiens
gcagaaaatatcctggcagggaatctggcttaaacatgaaatgctgtaat

SEQ ID NO: 1887 - DNA, 50 bp, Homo sapiens
tgtgtgcataatagctacagtgcatagttgtagacaaagtacattctggg

SEQ ID NO: 1888 - DNA, 50 bp, Homo sapiens
tctcagtgggtggtagcagagggatcaagcagttatttgatttgtgctct

SEQ ID NO: 1889 - DNA, 50 bp, Homo sapiens
gtctatttacggaactcaaatacgtgggcattcaaatgtattacagtggg

SEQ ID NO: 1890 - DNA, 50 bp, Homo sapiens
tgcacttttagaaatgcatatttgccacaaaacctgtattactgaataat

SEQ ID NO: 1891 - DNA, 50 bp, Homo sapiens
gggaggggattaaccaaaggccaccctgactttgtttttgtggacacaca

SEQ ID NO: 1892 - DNA, 50 bp, Homo sapiens
gcctgcccctgtgtattcaccaccaataaatcagaccatgaaacctgaaa

SEQ ID NO: 1893 - DNA, 50 bp, Homo sapiens
aggtgtatttatgttaccgttctgaataaacagaatggaccattgaacca

SEQ ID NO: 1894 - DNA, 50 bp, Homo sapiens
tgtaatgaatttgtcgcaaagacgtaataaaattaactggtggcacggtc

SEQ ID NO: 1895 - DNA, 50 bp, Homo sapiens
tgtcaatggaagttggctgcacttgatgtttgtttgcatgatgtctacct

SEQ ID NO: 1896 - DNA, 50 bp, Homo sapiens
tcgagcacctgtaaacaattttctcaacctatttgatgttcaaataaaga

SEQ ID NO: 1897 - DNA, 50 bp, Homo sapiens
aactttactaagtaatctcacagcatttgccaagtctcccaatatccaat

SEQ ID NO: 1898 - DNA, 50 bp, Homo sapiens
taagatctttaaactgctttatacactgtcacgtggcttcatcagctgtg

SEQ ID NO: 1899 - DNA, 50 bp, Homo sapiens
aaaaccactaccctcagagagagccaaaaatacagaagaggcggagagcg

SEQ ID NO: 1900 - DNA, 50 bp, Homo sapiens
cgagcaagcctgggaactcaggaaaattcacaggacttgggagattctaa

SEQ ID NO: 1901 - DNA, 50 bp, Homo sapiens
ggcttagctacagtgaagttttgcattgcttttgaagacaagaaaagtgc

SEQ ID NO: 1902 - DNA, 50 bp, Homo sapiens
acttcaaaattaccttttcatatccatgatcttgagtccatttgggggat

SEQ ID NO: 1903 - DNA, 50 bp, Homo sapiens
caaacacttttgggccaggatttgagtctctgcatgacatatacttgatt

SEQ ID NO: 1904 - DNA, 50 bp, Homo sapiens
cagactccaccaagcctggtcagcccaaaccaccagaagcccagaataaa

SEQ ID NO: 1905 - DNA, 50 bp, Homo sapiens
agtgcagaatctcataggttgccaataatacactaattcctttctatcct

SEQ ID NO: 1906 - DNA, 50 bp, Homo sapiens
agactgactacattggaagctttgagttgacttctgaccaaaggtggtaa

SEQ ID NO: 1907 - DNA, 50 bp, Homo sapiens; identical to SEQ ID NO: 1761

SEQ ID NO: 1908 - DNA, 50 bp, Homo sapiens
gtggtgagggcagttctgcacccagccaaacacataacaataaaaaccaa

SEQ ID NO: 1909 - DNA, 50 bp, Homo sapiens
tctgtgtcctaaagatgtgttctctataaaatacaaaccaacgtgcctaa

SEQ ID NO: 1910 - DNA, 50 bp, Homo sapiens
ctagtcatagaaatacctcattcgcctgtgggaagagaagggaagcctct

SEQ ID NO: 1911 - DNA, 50 bp, Homo sapiens
agcagcggctggatgtgatatgtctagtttaaccagtccccttgatcttt

SEQ ID NO: 1912 - DNA, 50 bp, Homo sapiens
tattggaggactccctcccagctttggaagggtcatccgcgtgtgtgtgt

SEQ ID NO: 1913 - DNA, 50 bp, Homo sapiens
atacaaagcaaacaaactcaagttatgtcatacctttggatacgaagacc

SEQ ID NO: 1914 - DNA, 50 bp, Homo sapiens; identical to SEQ ID NO: 1575

SEQ ID NO: 1915 - DNA, 50 bp, Homo sapiens; identical to SEQ ID NO: 257

SEQ ID NO: 1916 - DNA, 50 bp, Homo sapiens
gcccaaagaagcaaggaaccaaatttaagactctcgcatcttcccaaccc

SEQ ID NO: 1917 - DNA, 50 bp, Homo sapiens
ccggagtctgggattcatcccgtcatttctttcaataaataattattgga

SEQ ID NO: 1918 - DNA, 50 bp, Homo sapiens
gcaatggcagccttggcaaacgctaaatgaaaatcgtgacaacacttgtg

SEQ ID NO: 1919 - DNA, 50 bp, Homo sapiens
agtgttggtagcacttaagacttatacttgccttctgatagtattccttt

SEQ ID NO: 1920 - DNA, 50 bp, Homo sapiens
aactgaggactgtttgcaattgacataggcaataataagtgatgtgctga

SEQ ID NO: 1921 - DNA, 50 bp, Homo sapiens
gggctcagttctgccttatctaaatcaccagagaccaaacaaggactaat

SEQ ID NO: 1922 - DNA, 50 bp, Homo sapiens; identical to SEQ ID NO: 614

SEQ ID NO: 1923 - DNA, 50 bp, Homo sapiens
tcttggaaacttccattaagtgtgtagattgagcaggtagtaattgcatg

SEQ ID NO: 1924 - DNA, 50 bp, Homo sapiens
actactcagcatggaaacaagatgaaattccatttgtaggtagtgagaca

SEQ ID NO: 1925 - DNA, 50 bp, Homo sapiens
cactaatgatcctgctaccctcttgaagaccagcccggtacctctctccc

SEQ ID NO: 1926 - DNA, 50 bp, Homo sapiens
gtgacctcacttctggcactgtgactactatggctgtttagaactactga

SEQ ID NO: 1927 - DNA, 50 bp, Homo sapiens
aagccttattcttcaactaaaagatgaggattaagagcaagaagttgggg

SEQ ID NO: 1928 - DNA, 50 bp, Homo sapiens
gcactgaatcgtttcatgtaagaatccaaagtggacaccattaacaggtc

SEQ ID NO: 1929 - DNA, 50 bp, Homo sapiens
ggtgctcacattccttaaattaaggagaaatgctggcatagagcagcact

SEQ ID NO: 1930 - DNA, 50 bp, Homo sapiens
cttttgttctctccgtgaaacttacctttccctttttctttctctttttt

SEQ ID NO: 1931 - DNA, 50 bp, Homo sapiens
tggtatgtagagcttagatttccctattgtgacagagccatggtgtgttt

SEQ ID NO: 1932 - DNA, 50 bp, Homo sapiens
tggagataatctagaacacaggcaaaatccttgcttatgacatcacttgt

SEQ ID NO: 1933 - DNA, 50 bp, Homo sapiens
gtgcctctgtgctgtgtatgtgaaccacccatgtgagggaataaacctag

SEQ ID NO: 1934 - DNA, 50 bp, Homo sapiens
tgcaaacggttttgtaagttaacactacactactcacaatggtaggggaa

SEQ ID NO: 1935 - DNA, 50 bp, Homo sapiens
cctgtgcccagcaggaaggaagtcaaataaaccacactgactacctgtgc

SEQ ID NO: 1936 - DNA, 50 bp, Homo sapiens
cccaacaatcccaaggccctttttatacaaaaattctcagttctcttcac

SEQ ID NO: 1937 - DNA, 50 bp, Homo sapiens
tgtctgttttaatcatgtatctggaatagggtcgggaagggtttgtgcta

SEQ ID NO: 1938 - DNA, 50 bp, Homo sapiens
cacgatggtggaaacagtggggaactactgctggaaaaagccctaatagc

SEQ ID NO: 1939 - DNA, 50 bp, Homo sapiens
ccctggaggcactgaagtgcttagtgtacttggagtattggggtctgacc

SEQ ID NO: 1940 - DNA, 50 bp, Homo sapiens
acaagtttacatgataaaaagaaatgtgatttgtcttcccttctttgcac

SEQ ID NO: 1941 - DNA, 50 bp, Homo sapiens
ttgtatgtgaataattctagcgggggacctgggagataattctacgggga

SEQ ID NO: 1942 - DNA, 50 bp, Homo sapiens
atctattctaacgcaaaaccactaactgaagttcagatataatggatggt

SEQ ID NO: 1943 - DNA, 50 bp, Homo sapiens
gtaacggaacatatccagtactcctggttcctaggtgagcaggtgatgcc

SEQ ID NO: 1944 - DNA, 50 bp, Homo sapiens
actaatttgatgtttacaggtggacacacaaggtgcaaatcaatgcgtac

SEQ ID NO: 1945 - DNA, 50 bp, Homo sapiens
tgtgtgttttagtttcatcacctgttatctgtgtttgctgaggagagtgg

SEQ ID NO: 1946 - DNA, 50 bp, Homo sapiens
ttggagctgttccattgggtcctcttggtgtcgtttccctcccaacagag

SEQ ID NO: 1947 - DNA, 50 bp, Homo sapiens
atttgttgctctcagactgtgtaaaacaaaatttattcatgttttctgca

SEQ ID NO: 1948 - DNA, 50 bp, Homo sapiens
ctgaaccattactgtaattggctcttaaggcttgaagtaaccttataggt

SEQ ID NO: 1949 - DNA, 50 bp, Homo sapiens
gctaagctgccggttcttaaatccatcctgctaagttaatgttgggtaga

SEQ ID NO: 1950 - DNA, 50 bp, Homo sapiens
tgtaaccaataaatctgtagtgaccttacctgtattccctgtgctatcct

SEQ ID NO: 1951 - DNA, 50 bp, Homo sapiens; identical to SEQ ID NO: 305

SEQ ID NO: 1952 - DNA, 50 bp, Homo sapiens
atttctcccttatctactgtgatgacttcagaagatacaatggtcccagg

SEQ ID NO: 1953 - DNA, 50 bp, Homo sapiens
tgtctggagggggtttgtgcctgataacgtaataacaccagtggagactt

SEQ ID NO: 1954 - DNA, 50 bp, Homo sapiens
acactgccttctcaactccaaactgactcttaagaagactgcattatatt

SEQ ID NO: 1955 - DNA, 50 bp, Homo sapiens
agatgttccaaatttagaaagcttaaggcggcctacagaaaaaggaaaaa

SEQ ID NO: 1956 - DNA, 50 bp, Homo sapiens
aagtccaactactaaactgggggatattatgaagggccttgagcatctgg

SEQ ID NO: 1957 - DNA, 50 bp, Homo sapiens
atccacctccctcccctagagctattctcctttgggtttcttgctgctgc

SEQ ID NO: 1958 - DNA, 50 bp, Homo sapiens
aaaaggccacagcaatctgtactacaatcaactttattttgaaatcatgt

SEQ ID NO: 1959 - DNA, 50 bp, Homo sapiens
gattagttaccattgaaattggttctgtcataaaacagcatgagtctggt

SEQ ID NO: 1960 - DNA, 50 bp, Homo sapiens
aaaaatacacatcacacccatttaaaagtgatcttgagaaccttttcaaa

SEQ ID NO: 1961 - DNA, 50 bp, Homo sapiens
acagcaacagctattaaatcagcaagttttggagcaaagacaacagcagt

SEQ ID NO: 1962 - DNA, 50 bp, Homo sapiens
tgaccagggcagtgaaaatgaaaccgcattttgggtgccattaaataggg

SEQ ID NO: 1963 - DNA, 50 bp, Homo sapiens
caatttctttattagagggccttattgatgtgttctaagtctttccagaa

SEQ ID NO: 1964 - DNA, 50 bp, Homo sapiens
agagctgaaatgtcaggaacaaaaagaagaacagctgcaggaaggggtgc

SEQ ID NO: 1965 - DNA, 50 bp, Homo sapiens
ggtaataagagcagtagcagcagcatctctgaacatttctctggatttgc

SEQ ID NO: 1966 - DNA, 50 bp, Homo sapiens
agagtttggaaaaagcctgtgaaaggtgtcttctttgacttaatgtcttt

SEQ ID NO: 1967 - DNA, 50 bp, Homo sapiens
gtatggtagattcaaatgaaccactgaaaaggcatttagtttcttgtccc

SEQ ID NO: 1968 - DNA, 50 bp, Homo sapiens; identical to SEQ ID NO: 1762

SEQ ID NO: 1969 - DNA, 50 bp, Homo sapiens
gctcttaagttgtggagagtgcaacagtagcataggaccctaccctctgg

SEQ ID NO: 1970 - DNA, 50 bp, Homo sapiens; identical to SEQ ID NO: 658

SEQ ID NO: 1971 - DNA, 50 bp, Homo sapiens
aaaacagccaaaactccacagtcaatattagtaatttcttgctggttgaa

SEQ ID NO: 1972 - DNA, 50 bp, Homo sapiens
tagcatttgtttaagggtgatagtcaaattatgtattggtggggctgggt

SEQ ID NO: 1973 - DNA, 50 bp, Homo sapiens
gcagatgagacagcaaccattgtagaatttctgaacagatggattacctt

SEQ ID NO: 1974 - DNA, 50 bp, Homo sapiens
tctaatttctgaaatgtgcagctcccatttggccttgtgcggttgtgttc

SEQ ID NO: 1975 - DNA, 50 bp, Homo sapiens
accagagtacgttggaaaacttcttggaaaggctaaagacgatcatgaga

SEQ ID NO: 1976 - DNA, 50 bp, Homo sapiens
tgaggacttttcgaccaattcaaccctttgccccacctttattaaaatct

SEQ ID NO: 1977 - DNA, 50 bp, Homo sapiens
gctggcccataaacaccctgtaggttcttgatatttataataaaattggt

SEQ ID NO: 1978 - DNA, 50 bp, Homo sapiens
cccagggagttgtgtctgtaatcggcctactattcagtggcgagaaataa

SEQ ID NO: 1979 - DNA, 50 bp, Homo sapiens; identical to SEQ ID NO: 1810

SEQ ID NO: 1980 - DNA, 50 bp, Homo sapiens
ttgttgacaactgtgactgtacccaaatggaaagtaactcatttgttaaa

SEQ ID NO: 1981 - DNA, 50 bp, Homo sapiens
gtcaagattgtgttttgaggtttccttcagacagattccaggcgatgtgc

SEQ ID NO: 1982 - DNA, 50 bp, Homo sapiens
tcaccagtccctccccaaatgctttccatgagttgcagttttttcctagt

SEQ ID NO: 1983 - DNA, 50 bp, Homo sapiens
tactttggggacttgtagggatgcctttctagtcctattctattgcagtt

SEQ ID NO: 1984 - DNA, 50 bp, Homo sapiens
ccatcggtgaaactaacagataagcaagagagatgttttggggactcatt

SEQ ID NO: 1985 - DNA, 50 bp, Homo sapiens; identical to SEQ ID NO: 1781

SEQ ID NO: 1986 - DNA, 50 bp, Homo sapiens
caccaggaacctgctttagtgggggatagtgaagaagacaataaaagata

SEQ ID NO: 1987 - DNA, 50 bp, Homo sapiens
ggctacagaaagaagatgccagatgacacttaagacctacttgtgatatt

SEQ ID NO: 1988 - DNA, 50 bp, Homo sapiens
gcatttccacaccaagcagcaacagcaaatcacgaccactgatagatgtc

SEQ ID NO: 1989 - DNA, 50 bp, Homo sapiens
tccccaaaccataaaaccctatacaagttgttctagtaacaatacatgag

SEQ ID NO: 1990 - DNA, 50 bp, Homo sapiens
gcttccggtccttagccttcccaggtgggactttaggcatgattaaaata

SEQ ID NO: 1991 - DNA, 50 bp, Homo sapiens
tgctattgccttcctattttgcataataaatgcttcagtgaaaatgcagc

SEQ ID NO: 1992 - DNA, 50 bp, Homo sapiens
ggaagaagagggagagatggagcaaagtgagggccgagtgagagcgtgct

SEQ ID NO: 1993 - DNA, 50 bp, Homo sapiens; identical to SEQ ID NO: 1831

SEQ ID NO: 1994 - DNA, 50 bp, Homo sapiens
ctcagctaaaaggccacccctttatcgcattgctgtccttgggtagaata

SEQ ID NO: 1995 - DNA, 50 bp, Homo sapiens
accttatgaactacagtggagctacactcattgaaatgtaatttcagttc

SEQ ID NO: 1996 - DNA, 50 bp, Homo sapiens; identical to SEQ ID NO: 32

SEQ ID NO: 1997 - DNA, 50 bp, Homo sapiens
gccagatttggggcatttggaaagaagttcattgaagataaagcaaaagt

SEQ ID NO: 1998 - DNA, 50 bp, Homo sapiens
ctgcacccttcccccagcaccatttatgagtctcaagttttattattgca

SEQ ID NO: 1999 - DNA, 50 bp, Homo sapiens
ttttgaagaagggaaattcacactgtgcgttttgagtatgcaagaagaat

SEQ ID NO: 2000 - DNA, 50 bp, Homo sapiens
tgttgtgactttttagccagtgactttttctgagcttttcatggaagtgg

SEQ ID NO: 2001 - DNA, 50 bp, Homo sapiens
acttcacacagacaagtggctaagtgtccattatttaccttgaacaatca

SEQ ID NO: 2002 - DNA, 50 bp, Homo sapiens; identical to SEQ ID NO: 433

SEQ ID NO: 2003 - DNA, 50 bp, Homo sapiens; identical to SEQ ID NO: 1787

SEQ ID NO: 2004 - DNA, 50 bp, Homo sapiens
atggaaattgtatttgccttctccactttgggaggctcccacttcttggg

SEQ ID NO: 2005 - DNA, 50 bp, Homo sapiens
tcagagggaaagtaaatatttcaggcatactgacactttgccagaaagca

SEQ ID NO: 2006 - DNA, 50 bp, Homo sapiens
gtgtaacacagtgccttcaataaatggtatagcaaatgttttgacatgaa

SEQ ID NO: 2007 - DNA, 50 bp, Homo sapiens
tgggactattacatccacatgatacctctgatcaagtatttttgacattt

SEQ ID NO: 2008 - DNA, 50 bp, Homo sapiens
cattcgtatgagaagcggcttttctgaaaagggatccagcacacctcctc

SEQ ID NO: 2009 - DNA, 50 bp, Homo sapiens
cttcagactgaacatgtacactggtttgagcttagtgaaatgacttccgg

SEQ ID NO: 2010 - DNA, 50 bp, Homo sapiens
tttaaatgtttgtgttaatacacattaaaacatcgcacaaaaacgatgca

SEQ ID NO: 2011 - DNA, 50 bp, Homo sapiens
gcaaccttgcatccatctgggctaccccacccaagtatacaataaagtct

SEQ ID NO: 2012 - DNA, 50 bp, Homo sapiens
tgctggtggggaaagacttaaaagtggattaaagacctgcgtattgatga

SEQ ID NO: 2013 - DNA, 50 bp, Homo sapiens
aggggcgctcgcttccgcatcctagtctctatcattaaagttctagtgac

SEQ ID NO: 2014 - DNA, 50 bp, Homo sapiens
agctgatcctcgggaagaacaaagctaaagctgccttttgtctgttattt

SEQ ID NO: 2015 - DNA, 50 bp, Homo sapiens
cacaggcccatggactcacttttgtaacaaactcctaccaacactgacca

SEQ ID NO: 2016 - DNA, 50 bp, Homo sapiens
aggaggagtttctattaaaatctgtcacttgagtgatgtcatttaagtcc

SEQ ID NO: 2017 - DNA, 50 bp, Homo sapiens
cctgtgcaatagacacatacatgtcacatttagctgtgctcagaagggct

SEQ ID NO: 2018 - DNA, 50 bp, Homo sapiens; identical to SEQ ID NO: 2017

SEQ ID NO: 2019 - DNA, 50 bp, Homo sapiens
tgcacctgttactgttgggctttccactgagatctactggataaagaata

SEQ ID NO: 2020 - DNA, 50 bp, Homo sapiens
aagaaggagcttaatgccaggaacagattttgcagttggtggggtctcaa

SEQ ID NO: 2021 - DNA, 50 bp, Homo sapiens
agggctacctgcgatctgtgtttgctctgacgaatggaatttatcctcac

SEQ ID NO: 2022 - DNA, 50 bp, Homo sapiens
ccatgattatttttctaagctggttggttaataaacagtacctgctctca

SEQ ID NO: 2023 - DNA, 50 bp, Homo sapiens
aaaggctaaagaacttgccactaaactgggttaaatgtacactgttgagt

SEQ ID NO: 2024 - DNA, 50 bp, Homo sapiens
ggaaccaagactgtgcaggagaaagagaactagtgctgagggcctcaata

SEQ ID NO: 2025 - DNA, 50 bp, Homo sapiens
tggttccagcagaagtatgatgggatcatccttcctggcaaataaattcc

SEQ ID NO: 2026 - DNA, 50 bp, Homo sapiens
ttggttgtttggttagtgactgatgtaaaacggttttcttgtggggaggt

SEQ ID NO: 2027 - DNA, 50 bp, Homo sapiens
atgctggcagcattgcatgattctccagtatatttgtaaaaaataaaaaa

SEQ ID NO: 2028 - DNA, 50 bp, Homo sapiens
cgggccagccgaggctacaaaaactaaccctggatcctactctcttatta

SEQ ID NO: 2029 - DNA, 50 bp, Homo sapiens; identical to SEQ ID NO: 106

SEQ ID NO: 2030 - DNA, 50 bp, Homo sapiens
ttcaactaaagcgccacctgctccacccagagaagcacactttgtgagaa

SEQ ID NO: 2031 - DNA, 50 bp, Homo sapiens
ttggaaatcatagtcaaagggcttccttggttcgccactcatttatttgt

SEQ ID NO: 2032 - DNA, 50 bp, Homo sapiens; identical to SEQ ID NO: 2031

SEQ ID NO: 2033 - DNA, 50 bp, Homo sapiens
cctgatggagagaagaaggcatatgttcgactggctcctgattacgatgc

SEQ ID NO: 2034 - DNA, 50 bp, Homo sapiens
cagaagaaactgaagaaacaaaaacttatggcacgggagtaaattcagca

SEQ ID NO: 2035 - DNA, 50 bp, Homo sapiens
gtttcagctccccgagttggtggaaaacgctaaactggcagattagattt

SEQ ID NO: 2036 - DNA, 50 bp, Homo sapiens
ctcctgttgggtaagggtgttgagtgtgacttgtgctgaaaacctggttc

SEQ ID NO: 2037 - DNA, 50 bp, Homo sapiens
gaacaagtggttcttccagaaactgcggttttagatgctttgttttgatc

SEQ ID NO: 2038 - DNA, 50 bp, Homo sapiens
ggcttgaagccacatggagggagtttcattaaatgctaactacttttaaa

SEQ ID NO: 2039 - DNA, 50 bp, Homo sapiens
atctacagacagtcaatgtggatgagaactaatcgctgatcaaataacgt

SEQ ID NO: 2040 - DNA, 50 bp, Homo sapiens
gcgcagtgaagaaaatgagtaggcagctcatgtgcacgttttctgtttaa

SEQ ID NO: 2041 - DNA, 50 bp, Homo sapiens
caatcttcctgctaaggccattggacacagaatccgagtgatgctgtacc

SEQ ID NO: 2042 - DNA, 50 bp, Homo sapiens
ggcagctgttgcagcatccagttcatcttaagaatgtcaacgattagtca

SEQ ID NO: 2043 - DNA, 50 bp, Homo sapiens
agacgctcctctactctttggagacatcactggcctataataaatgggtt

SEQ ID NO: 2044 - DNA, 50 bp, Homo sapiens
tctgttatgaacacgttggttggctggattcagtaataaatatgtaaggc

SEQ ID NO: 2045 - DNA, 50 bp, Homo sapiens
tgagaagaaggaggagtctgaagagtcagatgatgacatgggatttggcc

SEQ ID NO: 2046 - DNA, 50 bp, Homo sapiens
gctaaagttgaacgagctgatggatatgaaccaccagtccaagaatctgt

SEQ ID NO: 2047 - DNA, 50 bp, Homo sapiens
gctggccaccaaacagagcagtggctaaattgcagtagcagcatatcttt

SEQ ID NO: 2048 - DNA, 50 bp, Homo sapiens
gccaagtccaaccgctgattttcccagctgctgcccaataaacctgtctg

SEQ ID NO: 2049 - DNA, 50 bp, Homo sapiens
tggtgtctataagaagctcacgggcaaggatgttaattttgaattcccag

SEQ ID NO: 2050 - DNA, 50 bp, Homo sapiens; identical to SEQ ID NO: 78

SEQ ID NO: 2051 - DNA, 50 bp, Homo sapiens
catctacagcctctgccctggtcgcataaatttgtctgtgtactcaagca

SEQ ID NO: 2052 - DNA, 50 bp, Homo sapiens
ctaccagaaatcctaccgataagcccatcgtgactcaaaactcacttgta

SEQ ID NO: 2053 - DNA, 50 bp, Homo sapiens
ctcggggacctgtttgaattttttctgtagtgctgtattattttcaataa

SEQ ID NO: 2054 - DNA, 50 bp, Homo sapiens
gctgccaacaagaagcattagaacaaaccatgctgggttaataaattgcc

SEQ ID NO: 2055 - DNA, 50 bp, Homo sapiens
gatggcatcgtctcaaagaacttttgactggagagaatcacagatgtgga

SEQ ID NO: 2056 - DNA, 50 bp, Homo sapiens; identical to SEQ ID NO: 2055

SEQ ID NO: 2057 - DNA, 50 bp, Homo sapiens
ccaatgtttctcttttggccctatacaaaggcaagaaggaaagaccaaga

SEQ ID NO: 2058 - DNA, 50 bp, Homo sapiens
ctggcaaaaagccgaaggagtaaaggtgctgcaatgatgttagctgtggc

SEQ ID NO: 2059 - DNA, 50 bp, Homo sapiens
tggtgaagatgcatgaataggtccaaccagctgtacatttggaaaaataa

SEQ ID NO: 2060 - DNA, 50 bp, Homo sapiens
gccagtgtttccgtcagtacgcgaaggatatcggtttcattaagttggac

SEQ ID NO: 2061 - DNA, 50 bp, Homo sapiens
gagtgataactcatgagaagtactgataggacctttatctggatatggtc

SEQ ID NO: 2062 - DNA, 50 bp, Homo sapiens
ggtgattcttctctgttgaactgaagtttgtgagagtagttttcctttgc

SEQ ID NO: 2063 - DNA, 50 bp, Homo sapiens; identical to SEQ ID NO: 1804

SEQ ID NO: 2064 - DNA, 50 bp, Homo sapiens
ggggaaggtgtttttagtacaagacatcaaagtgaagtaaagcccaagtg

SEQ ID NO: 2065 - DNA, 50 bp, Homo sapiens
aggaaaacatccaaaacaacaagcaagaaaccgaagaagacatcttttga

SEQ ID NO: 2066 - DNA, 50 bp, Homo sapiens
agctgccacctcagtctcttctctgtattatcatagtctggtttaaataa

SEQ ID NO: 2067 - DNA, 50 bp, Homo sapiens
ggaggcagccagggcttacctgtacactgacttgagaccagttgaataaa

SEQ ID NO: 2068 - DNA, 50 bp, Homo sapiens
agcaaagatttcagtagaattttagtcctgaacgctacggggaaaatgca

SEQ ID NO: 2069 - DNA, 50 bp, Homo sapiens
tggtggtattcagtggtccaggattctgtaatgctttacacaggcagttt

SEQ ID NO: 2070 - DNA, 50 bp, Homo sapiens
tgcttttatgtgtcccttgataacagtgacttaacaatatacattcctca

SEQ ID NO: 2071 - DNA, 50 bp, Homo sapiens
ttgtttcaaaatgctgtttcatttttataaagtaccagtgtttagctgct

SEQ ID NO: 2072 - DNA, 50 bp, Homo sapiens
agagatggacaagagcagccaggagacccagcgatctgagcataaaactc

SEQ ID NO: 2073 - DNA, 50 bp, Homo sapiens
tgaaagagaaagactgattacctcctgtgtggaagaaggaaacaccgagt

SEQ ID NO: 2074 - DNA, 50 bp, Homo sapiens
ggaatacctcagaagagatgcttcattgagtgttcattaaaccacacatg

SEQ ID NO: 2075 - DNA, 50 bp, Homo sapiens
accatgatactttaattagaagcttagccttgaaattgtgaactcttgga

SEQ ID NO: 2076 - DNA, 50 bp, Homo sapiens; identical to SEQ ID NO: 2075

SEQ ID NO: 2077 - DNA, 50 bp, Homo sapiens
gcctctgccctggtttggctatgtcagatccaataaacatcctgaacctc

SEQ ID NO: 2078 - DNA, 50 bp, Homo sapiens
tgccttttctaccccatccctcacagcctcttgctgctaaaatagatgtt

SEQ ID NO: 2079 - DNA, 50 bp, Homo sapiens
ggccaggcccaagtaagtgtaccttgtactttataaataaacctcaagca

SEQ ID NO: 2080 - DNA, 50 bp, Homo sapiens
gccgaattgtctttggtgcttttcacttgtgttttaaaataaggattttt

SEQ ID NO: 2081 - DNA, 50 bp, Homo sapiens; identical to SEQ ID NO: 1720

SEQ ID NO: 2082 - DNA, 50 bp, Homo sapiens
agaagtcccccatgtggatatttcttatactaattgtatcataaagccgt

SEQ ID NO: 2083 - DNA, 50 bp, Homo sapiens
gggcaggagcatggggtgcttggttgtttccttcctaataaaataaacgc

SEQ ID NO: 2084 - DNA, 50 bp, Homo sapiens
atgcatttggtatgaatctgtggttgtatctgttcaattctaaagtacaa

SEQ ID NO: 2085 - DNA, 50 bp, Homo sapiens
ttctctaggttactgttgggagcttaatggtagaaacttccttggtttca

SEQ ID NO: 2086 - DNA, 50 bp, Homo sapiens
cctcccagcaacccactacctctggtacctgtaaaggtcaaacaagaaac

SEQ ID NO: 2087 - DNA, 50 bp, Homo sapiens
ccgtgtctgtttgtaggcggagaaaccgttgggtaacttgttcaagatat

SEQ ID NO: 2088 - DNA, 50 bp, Homo sapiens
tgagggtgagggcaggctgaggcaacgagtgggaggttcaaacaagagtg

SEQ ID NO: 2089 - DNA, 50 bp, Homo sapiens
cccaaacaatctgtggatggaaaagcaccacttgctactggagaggatga

SEQ ID NO: 2090 - DNA, 50 bp, Homo sapiens
aatcaacttcaaggagcaccttcattagtacagcttgcatatttaacatt

SEQ ID NO: 2091 - DNA, 50 bp, Homo sapiens
aggcgatgatattctcaccatcctgactgaagtgaactatgaagtaagca

SEQ ID NO: 2092 - DNA, 50 bp, Homo sapiens
tgacgacctggtagaatctctctaaccatttgaagttgatttctcaatgc

SEQ ID NO: 2093 - DNA, 50 bp, Homo sapiens
gctgcgaaagacccacatgctacaagacgggcaaaataaagtgacagatg

SEQ ID NO: 2094 - DNA, 50 bp, Homo sapiens
cgcccatgatgggagggattgacatgtttcaacaaaataatgcacttcct

SEQ ID NO: 2095 - DNA, 50 bp, Homo sapiens
tctttcagatagcaggcagggaagcaatgtagtgtggtgggcagagcccc

SEQ ID NO: 2096 - DNA, 50 bp, Homo sapiens
caggaggatggcaaagagagtcgcatctcagtgcaggagagacagtgagg

SEQ ID NO: 2097 - DNA, 50 bp, Homo sapiens
gggggtagtggtggcaggacaagagaaggcattgagctttttctttcatt

SEQ ID NO: 2098 - DNA, 50 bp, Homo sapiens
gccatgaaggagcaagttttgtatttgtgacctcagctttgggaataaag

SEQ ID NO: 2099 - DNA, 50 bp, Homo sapiens; identical to SEQ ID NO: 621

SEQ ID NO: 2100 - DNA, 50 bp, Homo sapiens
accaagtttcaggggacatgagttttccagcttttatacacacgtatctc

SEQ ID NO: 2101 - DNA, 50 bp, Homo sapiens
ggcaaatgaggaacagggcaatagtatgatgaatcttgattggagttggt

SEQ ID NO: 2102 - DNA, 50 bp, Homo sapiens; identical to SEQ ID NO: 165

SEQ ID NO: 2103 - DNA, 50 bp, Homo sapiens
tataccatgagatgagatgaccaccaatcatttccttggggggagggggt

SEQ ID NO: 2104 - DNA, 50 bp, Homo sapiens
cctaggaaatcacaggcttctgagcacagctgcattaaaacaaaggaagt

SEQ ID NO: 2105 - DNA, 50 bp, Homo sapiens
aaatgtaaccttttgctttccaaattaaagaactccatgccactcctcaa

SEQ ID NO: 2106 - DNA, 50 bp, Homo sapiens
acacacatacacacaccccaaaacacatacattgaaagtgcctcatctga

SEQ ID NO: 2107 - DNA, 50 bp, Homo sapiens
gaccctatcctcccaccgcctccgttaacacgatcctgaataaatcttga

SEQ ID NO: 2108 - DNA, 50 bp, Homo sapiens
acagcaaagcccattggccagaaaggaaagacaataattttgttttttca

SEQ ID NO: 2109 - DNA, 50 bp, Homo sapiens
aaggagtaaagatttgcctttaaataacttggtattttcctggctttcgt

SEQ ID NO: 2110 - DNA, 50 bp, Homo sapiens
ggcctcgtttacttttaaaaaatgaaattgttcattgctgggagaagaat

SEQ ID NO: 2111 - DNA, 50 bp, Homo sapiens
tcaactaatgatttagtgatcaaattgtgcagtactttgtgcattctgga

SEQ ID NO: 2112 - DNA, 50 bp, Homo sapiens
taggtttctgacttttgtggatcattttgcacatagctttatcaactttt

SEQ ID NO: 2113 - DNA, 50 bp, Homo sapiens
aaatcagtactttttaatggaaacaacttgacccccaaatttgtcacaga

SEQ ID NO: 2114 - DNA, 50 bp, Homo sapiens; identical to SEQ ID NO: 88

SEQ ID NO: 2115 - DNA, 50 bp, Homo sapiens
caggaggggggagggaagggagccaagggatggacatcttgtcatttttt

SEQ ID NO: 2116 - DNA, 50 bp, Homo sapiens
gcaagtatgctgctctctctgttgatggtgaagatgaaaatgagggagaa

SEQ ID NO: 2117 - DNA, 50 bp, Homo sapiens
ttgtgggtgtgaaacaaatggtgagaatttgaattggtccctcctattat

SEQ ID NO: 2118 - DNA, 50 bp, Homo sapiens
aaagggaaaaagacctcgtggagaatttttactggggattcttgaacttg

SEQ ID NO: 2119 - DNA, 50 bp, Homo sapiens
aaatgtatttactatgcgtgtttccagcagttggcattaaagtgcctttt

SEQ ID NO: 2120 - DNA, 50 bp, Homo sapiens
atttgcattactctggtggattgttctagtactgtattgggcttcttcgt

SEQ ID NO: 2121 - DNA, 50 bp, Homo sapiens
gaggaggtctcttctatgccaccggcctctgccagctttgcaccagcgtg

SEQ ID NO: 2122 - DNA, 50 bp, Homo sapiens; identical to SEQ ID NO: 1465

SEQ ID NO: 2123 - DNA, 50 bp, Homo sapiens
tttgaagagccattttggtaaacggtttttattaaagatgctatggaaca

SEQ ID NO: 2124 - DNA, 50 bp, Homo sapiens
gtcaggattgcgagagatgtgtgttgatactgttgcacgtgtgtttttct

SEQ ID NO: 2125 - DNA, 50 bp, Homo sapiens; identical to SEQ ID NO: 1857

SEQ ID NO: 2126 - DNA, 50 bp, Homo sapiens
taatggccccttaccctgggtgaagcacttacccttggaacagaactcta

SEQ ID NO: 2127 - DNA, 50 bp, Homo sapiens
aaggcctcatcctggggaggatacgtaggcacacagaggggagtcaccag

SEQ ID NO: 2128 - DNA, 50 bp, Homo sapiens
tggggtaagtggagttgggaaatacaagaagagaaagaccagtggggatt

SEQ ID NO: 2129 - DNA, 50 bp, Homo sapiens
acctagcggacaatgatggagagatctatgatgatattgctgatggctgc

SEQ ID NO: 2130 - DNA, 50 bp, Homo sapiens
gtgatggtgtagccctcccactttgctgttccttactttactgcctgaat

SEQ ID NO: 2131 - DNA, 50 bp, Homo sapiens
gcctctacttctgtctcaaaatggctccaaatgatttctgtactgcaaaa

SEQ ID NO: 2132 - DNA, 50 bp, Homo sapiens
tctccttccacagtttatttcctcgcttcctttgcatctaaacctttctt

SEQ ID NO: 2133 - DNA, 50 bp, Homo sapiens
acactgttgccctggctgtattcataagattccagctccttcaggtgttt

SEQ ID NO: 2134 - DNA, 50 bp, Homo sapiens
gtcaatattctgcaatttcagccccatttgtactacgtgcgagacagcct

SEQ ID NO: 2135 - DNA, 50 bp, Homo sapiens
ggcgggactgggcggggcggggcatcagaactcaggtgttttttatttac

SEQ ID NO: 2136 - DNA, 50 bp, Homo sapiens
ttccttttgctctttgtggttggatctaacactaactgtattgttttgtt

SEQ ID NO: 2137 - DNA, 50 bp, Homo sapiens
acgtcttccaaataaattatgtgttggtgccatcgcacatgctcaataaa

SEQ ID NO: 2138 - DNA, 50 bp, Homo sapiens; identical to SEQ ID NO: 1705

SEQ ID NO: 2139 - DNA, 50 bp, Homo sapiens
ctgagactggctgctgactttgagaactctgtgagacaaggtccttaggc

SEQ ID NO: 2140 - DNA, 50 bp, Homo sapiens
gcagggaagctttgcatgttgctctaaggtacatttttaaagagttgttt

SEQ ID NO: 2141 - DNA, 50 bp, Homo sapiens
cgaaccaaagctagaagcaaatgtcgagataagagagcagatgttggaga

SEQ ID NO: 2142 - DNA, 50 bp, Homo sapiens
ggaaggaaaagagtgctgagaaatggctctgtataatctatggctatccg

SEQ ID NO: 2143 - DNA, 50 bp, Homo sapiens
accaaggctagaaccacctgcctatattttttgttaaatgatttcattca

SEQ ID NO: 2144 - DNA, 50 bp, Homo sapiens
cctctgccaaagtactcttaggtgccagtctggtaactgaactccctctg

SEQ ID NO: 2145 - DNA, 50 bp, Homo sapiens
aaaataatgcaccacttttaacagaacagacagatgaggacagagctggt

SEQ ID NO: 2146 - DNA, 50 bp, Homo sapiens
gaattgggggatagatctataatgttcactgttcaaaacgaagactagct

SEQ ID NO: 2147 - DNA, 50 bp, Homo sapiens
ccgtttgctttcagaaaatgttttagggtaaatgcataagactatgcaat

SEQ ID NO: 2148 - DNA, 50 bp, Homo sapiens
cccaaattctttcagtggctacctacatacaattccaaacacatacagga

SEQ ID NO: 2149 - DNA, 50 bp, Homo sapiens
aaattaataagtcacaagaaaaacaaaagtgccagaagatgtccagccac

SEQ ID NO: 2150 - DNA, 50 bp, Homo sapiens
agaggctcctaactgggcaactcaagattctggcttctactgaagaacca

SEQ ID NO: 2151 - DNA, 50 bp, Homo sapiens
ggttttctactgttatgtgagaacattaggccccagcaacacgtcattgt

SEQ ID NO: 2152 - DNA, 50 bp, Homo sapiens
cagcttctgccacttcccaggtaagcaggaggaggtgccaacagtgttag

SEQ ID NO: 2153 - DNA, 50 bp, Homo sapiens
accatttttgttactctcttccacatgttactggataaattgtttagtgg

SEQ ID NO: 2154 - DNA, 50 bp, Homo sapiens
gtgccactaacggttgagttttgactgcttggaactggaatcctttcagc

SEQ ID NO: 2155 - DNA, 50 bp, Homo sapiens
tctccaccaccatctcccctctacttctcatttcctaactctctgctgaa

SEQ ID NO: 2156 - DNA, 50 bp, Homo sapiens
ggtgttggacttaaatcagttgaaatgtatttctgtaccacaatttacgc

SEQ ID NO: 2157 - DNA, 50 bp, Homo sapiens
cccttccgctgttcctgaaataacctttcataaagtgctttgggtgccat

SEQ ID NO: 2158 - DNA, 50 bp, Homo sapiens
ttctcatgtataaaactaggaatcctccaaccaggctcctgtgatagagt

SEQ ID NO: 2159 - DNA, 50 bp, Homo sapiens
agacacgtctatcagcttattccttctctactggaatattggtatagtca

SEQ ID NO: 2160 - DNA, 50 bp, Homo sapiens
tgtctggtaacaagatgtgactttttggtagcactgttgtggttcattct

SEQ ID NO: 2161 - DNA, 50 bp, Homo sapiens
tcctctttccagtggatcataagacaatggaccctttttgttatgatggt

SEQ ID NO: 2162 - DNA, 50 bp, Homo sapiens
actgttttgtatacttgttttcagttttcatttcgacaaacaagcactgt

SEQ ID NO: 2163 - DNA, 50 bp, Homo sapiens
acatagtttttatttttgtgtctgtgaaagtgccaagaacccctccccac

SEQ ID NO: 2164 - DNA, 50 bp, Homo sapiens
tcacctggacttaagcgtctggctctaattcacagtgctctttctcctca

SEQ ID NO: 2165 - DNA, 50 bp, Homo sapiens
agatgcctggcagggctgggtggcgattcataaagacctcgtgttgattc

SEQ ID NO: 2166 - DNA, 50 bp, Homo sapiens
ggatagtcaggagcgtcaatgtgcttgtacatagagtgctgtagctgtgt

SEQ ID NO: 2167 - DNA, 50 bp, Homo sapiens
ttgtgaaatatcttgttactgcttttatttagcagactgtggactgtaat

SEQ ID NO: 2168 - DNA, 50 bp, Homo sapiens
ctggaggacctgttgatgctagttcagagtatcaccaagagctggagagg

SEQ ID NO: 2169 - DNA, 50 bp, Homo sapiens
gctgcacaagagccttgattgaagatatattctttctgaacagtatttaa

SEQ ID NO: 2170 - DNA, 50 bp, Homo sapiens
ttgcctttataaaaacttgctgcctgactaaagattaacaggttatagtt

SEQ ID NO: 2171 - DNA, 50 bp, Homo sapiens
tggttctgctttttgacctctctctaccttttcagggtaatctttgtggc

SEQ ID NO: 2172 - DNA, 50 bp, Homo sapiens
cctgtccttgtgtttgtgtgtgctaacagaaataagttgcagtatggtcg

SEQ ID NO: 2173 - DNA, 50 bp, Homo sapiens
aaaagtgttggttttctgccatcagtgaaaattcttaaacttggagcaac

SEQ ID NO: 2174 - DNA, 50 bp, Homo sapiens
agggtttggctgtgtctaaactgcattaccgcgttgtaaaaaatagctgt

SEQ ID NO: 2175 - DNA, 50 bp, Homo sapiens
cctaggctgcgctccagcactgcggggcttttctgcaataaagtcacgag

SEQ ID NO: 2176 - DNA, 50 bp, Homo sapiens
ggcagcacagagacccccggaacaagcctaaaaattgtttcaaaataaaa

SEQ ID NO: 2177 - DNA, 50 bp, Homo sapiens
aagtcttttccacaaaccaccatctattttgtgaactttgttagtcatct

SEQ ID NO: 2178 - DNA, 50 bp, Homo sapiens
tggcaagttggaaaatatgtaactggaatctcaaaagttctttgggacaa

SEQ ID NO: 2179 - DNA, 50 bp, Homo sapiens
tctgcttatggcacaatttgcctcaaatccattccaagttgtatatttgt

SEQ ID NO: 2180 - DNA, 50 bp, Homo sapiens
ccattgttgtcaaatgcccagtgtccatcagatgtgttcctccattttct

SEQ ID NO: 2181 - DNA, 50 bp, Homo sapiens
gctgcctctgtaaattcatgtattcaaaggaaaagacaccttgcctataa

SEQ ID NO: 2182 - DNA, 50 bp, Homo sapiens
tcaagtcagcaacagagcaaaataaaggttagataagtccttgtgtagca

SEQ ID NO: 2183 - DNA, 50 bp, Homo sapiens; identical to SEQ ID NO: 1719

SEQ ID NO: 2184 - DNA, 50 bp, Homo sapiens
tggttttgaatgcaattaggttatgctatttggacaataaactcaccttg

SEQ ID NO: 2185 - DNA, 50 bp, Homo sapiens
tgcaaggtttaggctggtggcccaggaccatcatcctactgtaataaaga

SEQ ID NO: 2186 - DNA, 50 bp, Homo sapiens
gtgtggtcggggtgagaacccaagcgttggaactgtagacccgtcctgtc

SEQ ID NO: 2187 - DNA, 50 bp, Homo sapiens
agcagcagtgacataaaattccatgttagataagcatatgttacttacct

SEQ ID NO: 2188 - DNA, 50 bp, Homo sapiens
ctccacaataaggtcaatgccagagacggaagcctttttccccaaagtct

SEQ ID NO: 2189 - DNA, 50 bp, Homo sapiens
tggaggtattcaatatcctttgcctcaaggacttcggcagatactgtctc

SEQ ID NO: 2190 - DNA, 50 bp, Homo sapiens
ggtgcccaccattcttggcctgttacttacctgagatgagctcttttaac

SEQ ID NO: 2191 - DNA, 50 bp, Homo sapiens
ttaagaagaaatacccactaacaaagaacaagcattagttttggctgtca

SEQ ID NO: 2192 - DNA, 50 bp, Homo sapiens; identical to SEQ ID NO: 248

SEQ ID NO: 2193 - DNA, 50 bp, Homo sapiens
gggcggcccggagccagccaggcagttttattgaaatctttttaaataat

SEQ ID NO: 2194 - DNA, 50 bp, Homo sapiens; identical to SEQ ID NO: 235

SEQ ID NO: 2195 - DNA, 50 bp, Homo sapiens
agagaacactggacaacattttactactgagggaaatagccaaaaaggca

SEQ ID NO: 2196 - DNA, 50 bp, Homo sapiens
catgggggcaacagccaaaataggggggtaatgatgtaggggccaagcag

SEQ ID NO: 2197 - DNA, 50 bp, Homo sapiens
ttctggaagatggtcagctatgaagtaatagagtttgcttaatcatttgt

SEQ ID NO: 2198 - DNA, 50 bp, Homo sapiens
gggtggctctgatatagtagctctggtgtagtttctgcatttcaagaaga

SEQ ID NO: 2199 - DNA, 50 bp, Homo sapiens
ttccagtcagtttttctcttaagtgcctgtttgagtttactgaaacagtt

SEQ ID NO: 2200 - DNA, 50 bp, Homo sapiens
aaggaccaaggagatgaagcaaacacattaagccttccacactcacctct

SEQ ID NO: 2201 - DNA, 50 bp, Homo sapiens
aggtgcagcctctggaagtggatcaaactagaactcatatgccatactag

SEQ ID NO: 2202 - DNA, 50 bp, Homo sapiens
acttaaaagtttagggttttctcttggttgtagagtggcccagaattgca

SEQ ID NO: 2203 - DNA, 50 bp, Homo sapiens
gtcttgtgactagtgctgaagcttattaatgctaagggcaggcccaaatt

SEQ ID NO: 2204 - DNA, 50 bp, Homo sapiens
ccagagctgctattagaagctgcttcctgtgaagatcaatcttcctgagt

SEQ ID NO: 2205 - DNA, 50 bp, Homo sapiens
tcctctttctcccagcttcaaatgcacaattcatcattgggctcacttct

SEQ ID NO: 2206 - DNA, 50 bp, Homo sapiens
cagcttcaccctgtcaagttaacaaggaatgcctgtgccaataaaaggtt

SEQ ID NO: 2207 - DNA, 50 bp, Homo sapiens
ctcgaatcattgaagatccgagtgtgatttgaattctgtgatattttcac

SEQ ID NO: 2208 - DNA, 50 bp, Homo sapiens
cttcatctggaagaagaggcaagggggcaggagaccaggctctagctctg

SEQ ID NO: 2209 - DNA, 50 bp, Homo sapiens
agactttgccattgttgccattgttttcttttgtacctgaagcattttga

SEQ ID NO: 2210 - DNA, 50 bp, Homo sapiens
aaaagtaggggaggggctgggtctgcaaattaataaatagaagagggggt

SEQ ID NO: 2211 - DNA, 50 bp, Homo sapiens; identical to SEQ ID NO: 467

SEQ ID NO: 2212 - DNA, 50 bp, Homo sapiens
tcagtaaacaaattctttcacaaggtacaaaatcttgcataagctgaact

SEQ ID NO: 2213 - DNA, 50 bp, Homo sapiens
gttttacttaggacaagttgtaccttgccctctctccagctctgctccca

SEQ ID NO: 2214 - DNA, 50 bp, Homo sapiens; identical to SEQ ID NO: 306

SEQ ID NO: 2215 - DNA, 50 bp, Homo sapiens
tggatgtggctgctttcaacaagatctaaaatccatcctggatcatggca

SEQ ID NO: 2216 - DNA, 50 bp, Homo sapiens
tgtggtgtatatccttccaaaaaattaaaacgaaaataaagtagctgcga

SEQ ID NO: 2217 - DNA, 50 bp, Homo sapiens
gtcttccatgtgaacagcataagtttggagcactagtttgattattatgt

SEQ ID NO: 2218 - DNA, 50 bp, Homo sapiens
gcccacacccacactctccagcatctggcacaataaacattctctgtttt

SEQ ID NO: 2219 - DNA, 50 bp, Homo sapiens
agctgtttcctgggtaaatctagagtggggttttggttctttattttccc

SEQ ID NO: 2220 - DNA, 50 bp, Homo sapiens
gcaggagacattggtattctgggcagcttcctaatatgctttacaatctg

SEQ ID NO: 2221 - DNA, 50 bp, Homo sapiens
tggttttcatatcaaaagatcatgttgggattaacttgcctttttcccca

SEQ ID NO: 2222 - DNA, 50 bp, Homo sapiens
atctacaagcggagaaagtgacctagagattgcaagggcggggagaggag

SEQ ID NO: 2223 - DNA, 50 bp, Homo sapiens
tgtttaaatggcttggtgtctttcttttctaattatgcagaataagctct

SEQ ID NO: 2224 - DNA, 50 bp, Homo sapiens
aaaactgtactttgattcacatgttttcaaatggagttggagttcattca

SEQ ID NO: 2225 - DNA, 50 bp, Homo sapiens
tccatcagagctggtctgcacactcacattatcttgctatcactgtaacc

SEQ ID NO: 2226 - DNA, 50 bp, Homo sapiens
gacactttcgagctcccagctccagcttcgtctcaccttgagttaggctg

SEQ ID NO: 2227 - DNA, 50 bp, Homo sapiens; identical to SEQ ID NO: 115

SEQ ID NO: 2228 - DNA, 50 bp, Homo sapiens
aggagtcttttacccggtgtgctttgccgcagtcatccaaaataaattca

SEQ ID NO: 2229 - DNA, 50 bp, Homo sapiens
tagggagccgcaccttgtcatgtaccatcaataaagtaccctgtgctcaa

SEQ ID NO: 2230 - DNA, 50 bp, Homo sapiens
gctgtatataaacgtgtcccgagcttagattctgtatgcggtgacggcgg

SEQ ID NO: 2231 - DNA, 50 bp, Homo sapiens
tgtcttatgtgtcaaaagtcctaggaaagtggttgatgtttcttatagca

SEQ ID NO: 2232 - DNA, 50 bp, Homo sapiens
gctgaatgacatattttatcttgttctttaaaatcacaacacagagctgc

SEQ ID NO: 2233 - DNA, 50 bp, Homo sapiens
tgtctctctctctttttcttttctatggagcaaaacaaagctgatttccc

SEQ ID NO: 2234 - DNA, 50 bp, Homo sapiens
cagtgtactgcaaggaagctggatgcaagatagatactatattaaactgt

SEQ ID NO: 2235 - DNA, 50 bp, Homo sapiens
tgtattgtatgcaaatctgtgattgttggcagtgtcatctctgagaaaca

SEQ ID NO: 2236 - DNA, 50 bp, Homo sapiens
ggggtgtttgtgtgtgtgcgcgtgtgcgtttcaataaagtttgtacactt

SEQ ID NO: 2237 - DNA, 50 bp, Homo sapiens
tttagtatttttcccccaggccagatcattcgtgagtgtgcgagtgtgtg

SEQ ID NO: 2238 - DNA, 50 bp, Homo sapiens
tgctttgtttaaaggactgcagaccaaggagtcgagctttctctcagagc

SEQ ID NO: 2239 - DNA, 50 bp, Homo sapiens
accttatttccactctggtggataagttcaataaaggtcatatcccaaac

SEQ ID NO: 2240 - DNA, 50 bp, Homo sapiens
aatgttgtctgtcttctgtgctgttcctgtaagtttgctattaaaataca

SEQ ID NO: 2241 - DNA, 50 bp, Homo sapiens
accttcctcatttcacagataaggaatctttggggattaaccaacctcct

SEQ ID NO: 2242 - DNA, 50 bp, Homo sapiens
agatacctccccaccaccaattgccaaaggtccaataaaatgcctcaacc

SEQ ID NO: 2243 - DNA, 50 bp, Homo sapiens
gcaatccacaatctgacattctcaggaagcccccaagttgatatttctat

SEQ ID NO: 2244 - DNA, 50 bp, Homo sapiens
tctcaggctgcgtgcagcaacagtgcccagggctctgatgagtctctcat

SEQ ID NO: 2245 - DNA, 50 bp, Homo sapiens
gcctccaaccatgttcccttcttcttagcaccacaaataatcaaaaccca

SEQ ID NO: 2246 - DNA, 50 bp, Homo sapiens
ctcatcttcaacttttgtgctcccctttgcctaaaccctatggcctcctg

SEQ ID NO: 2247 - DNA, 50 bp, Homo sapiens; identical to SEQ ID NO: 818

SEQ ID NO: 2248 - DNA, 50 bp, Homo sapiens
tgtgtgtatggtagcacagcaaacttgtaggaattagtatcaatagtaaa

SEQ ID NO: 2249 - DNA, 50 bp, Homo sapiens
cctgcctggctctctcttcctaccctccttccacatgtacataaactgtc

SEQ ID NO: 2250 - DNA, 50 bp, Homo sapiens
agatgggaatgaagcttgtgtatccattatcatgtgtaatcaataaacga

SEQ ID NO: 2251 - DNA, 50 bp, Homo sapiens
ttaagatttttctcaaagttttgaaaagctattagccaggatcatggtgt

SEQ ID NO: 2252 - DNA, 50 bp, Homo sapiens; identical to SEQ ID NO: 647

SEQ ID NO: 2253 - DNA, 50 bp, Homo sapiens
ccattttgcctttctgacatttccttgggaatctgcaagaacctcccctt

SEQ ID NO: 2254 - DNA, 50 bp, Homo sapiens
ttccgtttggtagactccttccaatgaaatctcaggaataattaaactct

SEQ ID NO: 2255 - DNA, 50 bp, Homo sapiens
ggcagagaaggaggagtatgagcatcagaagagggagctggagcaaatct

SEQ ID NO: 2256 - DNA, 50 bp, Homo sapiens
agcagcctttctgtggagagtgagaataattgtgtacaaagtagagaagt

SEQ ID NO: 2257 - DNA, 50 bp, Homo sapiens
aatgataactaatgacatccagtgtctccaaaattgtttccttgtactga

SEQ ID NO: 2258 - DNA, 50 bp, Homo sapiens
tccctctgggactggacaattgcttcaagcattcttcaaccagcagatgc

SEQ ID NO: 2259 - DNA, 50 bp, Homo sapiens
cggctacatgcctcagtgaaggactagtagttcctgctacaacttcagca

SEQ ID NO: 2260 - DNA, 50 bp, Homo sapiens
catgagtcaagagcatcctgcttctaccatgtggatttggtcacaaggtt

SEQ ID NO: 2261 - DNA, 50 bp, Homo sapiens
gtcagaggtcctgtctggatggaggctggaggctcccccctcaacccctc

SEQ ID NO: 2262 - DNA, 50 bp, Homo sapiens
cctgatacacaattatgaccagaaaatatggctccatgaaggtgctactt

SEQ ID NO: 2263 - DNA, 50 bp, Homo sapiens
attcaattccagagtagtttcaagtttcacatcgtaaccattttcgcccg

SEQ ID NO: 2264 - DNA, 50 bp, Homo sapiens
tggaaatgtcatctaaccattaagtcatgtgtgaacacataaggacgtgt

SEQ ID NO: 2265 - DNA, 50 bp, Homo sapiens
aattcccagatttgaagacaaaaatactctaattctaaccagagcaagct

SEQ ID NO: 2266 - DNA, 50 bp, Homo sapiens
tggcagctacccccttcttgagagtccaagaacctggagcagaaataatt

SEQ ID NO: 2267 - DNA, 50 bp, Homo sapiens; identical to SEQ ID NO: 1730

SEQ ID NO: 2268 - DNA, 50 bp, Homo sapiens
tgccaagcacagtgcctgcatgtatttatccaataaatgtgaaattctgt

SEQ ID NO: 2269 - DNA, 50 bp, Homo sapiens
accactgtatgtttacttctcaccatttgagttgcccatcttgtttcaca

SEQ ID NO: 2270 - DNA, 50 bp, Homo sapiens
ggctgagggttctgctgtcctgtgccaccccattaaagtgcagttcctcc

SEQ ID NO: 2271 - DNA, 50 bp, Homo sapiens; identical to SEQ ID NO: 1840

SEQ ID NO: 2272 - DNA, 50 bp, Homo sapiens
agtctctaaagagtttattttaagacgtgtttgtgtttgtgtgtgtttgt

SEQ ID NO: 2273 - DNA, 50 bp, Homo sapiens
tggaagactaaagaggtgcaatgtgatctgagcctccatcattgtcctcc

SEQ ID NO: 2274 - DNA, 50 bp, Homo sapiens
gcagccagcagatctcagcagcccagtccaaataaacgtcctgtctagca

SEQ ID NO: 2275 - DNA, 50 bp, Homo sapiens
ggtaggagcaaccactgactggtcttaagctgttcttgcataggctctta

SEQ ID NO: 2276 - DNA, 50 bp, Homo sapiens
tcagctacactttgtttttaagtttgtttttgacatgtttatttggcaaa

SEQ ID NO: 2277 - DNA, 50 bp, Homo sapiens
tcccccctccgcctcccaggaagaaagaatgttactgccttaataaaaaa

SEQ ID NO: 2278 - DNA, 50 bp, Homo sapiens
gtgaatttgggctcacagaatcaaagcctatgcttggtagctcttgaaca

SEQ ID NO: 2279 - DNA, 50 bp, Homo sapiens
tccttcctttccactgaaaagcacatggccttgggtgacaaattcctctt

SEQ ID NO: 2280 - DNA, 50 bp, Homo sapiens
agaaatgttcagtaatgaaaaaatatatccaatcagagccatcccgaaaa

SEQ ID NO: 2281 - DNA, 50 bp, Homo sapiens
ttttaacttttaaggttgaaaagacaatagcccaaagccaagaaagaaaa

SEQ ID NO: 2282 - DNA, 50 bp, Homo sapiens
gcactcctttgtcatatactctgcatcactgtcatactcacaacttcgtg

SEQ ID NO: 2283 - DNA, 50 bp, Homo sapiens
tggcagtgggaaaaatgtaggagactgtttggaaattgattttgaacctg

SEQ ID NO: 2284 - DNA, 50 bp, Homo sapiens
catgcaaataaaaagaatgggacctaaactcgtgccgctcgtgccgaatt

SEQ ID NO: 2285 - DNA, 50 bp, Homo sapiens
ggattgcccatccatctgcttacaattccctgctgtcgtcttagcaagaa

SEQ ID NO: 2286 - DNA, 50 bp, Homo sapiens
gagcactggattgctttcccattatgagcgtccttcatctgggcagaccc

SEQ ID NO: 2287 - DNA, 50 bp, Homo sapiens; identical to SEQ ID NO: 1765

SEQ ID NO: 2288 - DNA, 50 bp, Homo sapiens; identical to SEQ ID NO: 1772

SEQ ID NO: 2289 - DNA, 50 bp, Homo sapiens; identical to SEQ ID NO: 1572

SEQ ID NO: 2290 - DNA, 50 bp, Homo sapiens
gacatgcgggctgggcagctgttagagtccaacgtggggcagcacagaga

SEQ ID NO: 2291 - DNA, 50 bp, Homo sapiens
accaaaattcagtgaaggcattctacaagttttgagttagcattacattt

SEQ ID NO: 2292 - DNA, 50 bp, Homo sapiens
taacactgcatcggatgcggggcgtggaggcaccgctgtattaaaggaag

SEQ ID NO: 2293 - DNA, 50 bp, Homo sapiens
tccatcgagcacgtctgaaacccctggtagccccgacttctttttaatta

SEQ ID NO: 2294 - DNA, 50 bp, Homo sapiens
cagtcactggtgtcaccctggataggcaagggataactcttctaacacaa

SEQ ID NO: 2295 - DNA, 50 bp, Homo sapiens
gggaagcactcgtgtgcaacagacaagtgactgtatctgtgtagactatt

SEQ ID NO: 2296 - DNA, 50 bp, Homo sapiens
tctatgagctttgtcagtgcgcgtagatgtcaataaatgttacatacaca

SEQ ID NO: 2297 - DNA, 50 bp, Homo sapiens
atatggtgctgttttctacccttggaaagaaatgtagatgatatgtttcg

SEQ ID NO: 2298 - DNA, 50 bp, Homo sapiens
ttgctaggcgagatagggggaagacagatatgggtgtttttaataaatct

SEQ ID NO: 2299 - DNA, 50 bp, Homo sapiens
aagttgcttcctaacatccttggactgagaaattatacttacttctggca

SEQ ID NO: 2300 - DNA, 50 bp, Homo sapiens
ctcaggcaaagaaaatgaaatgcatatttgcaaagtgtattaggaagtgt

SEQ ID NO: 2301 - DNA, 50 bp, Homo sapiens
tggaagagaggaataaataattcacctatatgtgtttgaggttgtgacag

SEQ ID NO: 2302 - DNA, 50 bp, Homo sapiens
gcctgagcaaagggcctgcccagacaagattttttaattgtttaaaaacc

SEQ ID NO: 2303 - DNA, 50 bp, Homo sapiens
aaatgacacatctgtgcaatagaatgatgtctgctctagggaaaccttca

SEQ ID NO: 2304 - DNA, 50 bp, Homo sapiens
atatttttatttgtttcagttcagataattggcaactgggtgaatctggc

SEQ ID NO: 2305 - DNA, 50 bp, Homo sapiens
ttcccaggaccgaacaagttccagaaaagactgaagaataatcacaattc

SEQ ID NO: 2306 - DNA, 50 bp, Homo sapiens
ttccttatctccctcagacgcagagtttttagtttctctagaaattttgt

SEQ ID NO: 2307 - DNA, 50 bp, Homo sapiens
ttttggaggggtttatgctcaatccatgttctatttcagtgccaataaaa

SEQ ID NO: 2308 - DNA, 50 bp, Homo sapiens
cattgagtggcgcagagccgggtttcatctggaattaactggatggaagg

SEQ ID NO: 2309 - DNA, 50 bp, Homo sapiens
tggaaattcccgtgttgcttcaaactgagacagatgggacttaacaggca

SEQ ID NO: 2310 - DNA, 50 bp, Homo sapiens; identical to SEQ ID NO: 2309

SEQ ID NO: 2311 - DNA, 50 bp, Homo sapiens
cgtcctgcggagccctgtctcctctctctgtaataaactcatttctagcc

SEQ ID NO: 2312 - DNA, 50 bp, Homo sapiens
tttccctgattatgatgagcttccattgttctgttaagtcttgaagagga

SEQ ID NO: 2313 - DNA, 50 bp, Homo sapiens
caaatgcaacctcacaaccttggctgagtcttgagactgaaagatttagc

SEQ ID NO: 2314 - DNA, 50 bp, Homo sapiens; identical to SEQ ID NO: 1862

SEQ ID NO: 2315 - DNA, 50 bp, Homo sapiens
tctgtcatgcccacaatccctttctaaggaagactgccctactatagcag

SEQ ID NO: 2316 - DNA, 50 bp, Homo sapiens
ggagaaataggaatttgtgaacccctaaaattgtagcaactttgaaaggt

SEQ ID NO: 2317 - DNA, 50 bp, Homo sapiens
acaagagtatccacaaaataggttggcactgactatatctctgcttgact

SEQ ID NO: 2318 - DNA, 50 bp, Homo sapiens
gccctcctgaaacttacacacaaaacgttaagtgatgaacattaaatagc

SEQ ID NO: 2319 - DNA, 50 bp, Homo sapiens
aaaccatctactatatgttagacatgacattctttttctctccttcctga

SEQ ID NO: 2320 - DNA, 50 bp, Homo sapiens
gtgtatctcgtggaatcagtggttagcattgccgctattatatttactca

SEQ ID NO: 2321 - DNA, 50 bp, Homo sapiens
ttgtgatgttaagaaatttgtatggtgtggcagtggtctattcctaagga

SEQ ID NO: 2322 - DNA, 50 bp, Homo sapiens
cggatgactgaccaagaggctattcaagatctctggcagtggaggaagtc

SEQ ID NO: 2323 - DNA, 50 bp, Homo sapiens
cctaaatctgtgtgtgtattgtgaagtggtataagaaatgactttgaacc

SEQ ID NO: 2324 - DNA, 50 bp, Homo sapiens
caggctgaggtggaccaagaaggcaaccaagtccccagaggagacccgcg

SEQ ID NO: 2325 - DNA, 50 bp, Homo sapiens
gaatgtagggaagaggtgccaagccaaccgtggggttagctctaattatt

SEQ ID NO: 2326 - DNA, 50 bp, Homo sapiens
acggggatgtcagggaggcaagtgtgttgtgttactgtgtcaataaactg

SEQ ID NO: 2327 - DNA, 50 bp, Homo sapiens
ggcagaatgggccaaaagcttagtgttgtgacctgtttttaaaataaagt

SEQ ID NO: 2328 - DNA, 50 bp, Homo sapiens
caagatggggtgggggatattgagggagacagcgctaaggatggttttat

SEQ ID NO: 2329 - DNA, 50 bp, Homo sapiens
taggcttctatttcctttccacccactcttcacaggctattctactttaa

SEQ ID NO: 2330 - DNA, 50 bp, Homo sapiens
ggtaaccaggtccaatcagtaaaaataagctgcttataactggaaatggc

SEQ ID NO: 2331 - DNA, 50 bp, Homo sapiens
tctgttttaagtaacagaattgataactgagcaaggaaacgtaatttgga

SEQ ID NO: 2332 - DNA, 50 bp, Homo sapiens
tgcctttaattgttctcataatgaagaataagtaggtaccctccatgccc

SEQ ID NO: 2333 - DNA, 50 bp, Homo sapiens
tgccattaagcaggaatgtcatgttccagttcattacaaaagaaaacaat

SEQ ID NO: 2334 - DNA, 50 bp, Homo sapiens
acctgttttgtatacctgagagcctgctatgttcttcttttgttgatcca

SEQ ID NO: 2335 - DNA, 50 bp, Homo sapiens
ctgcttccttcagtttgtaaagtcggtgattatatttttgggggctttcc

SEQ ID NO: 2336 - DNA, 50 bp, Homo sapiens
agcatacttcttttttccagtttcaatctaactgtgaaagaaacttctga

SEQ ID NO: 2337 - DNA, 50 bp, Homo sapiens
gaactctaacacttctctcctccactctgagccccctgaccttccaaacc

SEQ ID NO: 2338 - DNA, 50 bp, Homo sapiens
ccagtgcgtgctgtctgtggagtgtgtctcatgctttcagatgtgcatat

SEQ ID NO: 2339 - DNA, 50 bp, Homo sapiens
ccctgccacatgggtccagtgttcatctgagcataactgtactaaatcct

SEQ ID NO: 2340 - DNA, 50 bp, Homo sapiens
tgcttaaggcaagagtttcagatttactgttgaaataaacccaactgttc

SEQ ID NO: 2341 - DNA, 50 bp, Homo sapiens
cctgacccctcccatccttcccatttcctttgatgttattttgttacagc

SEQ ID NO: 2342 - DNA, 50 bp, Homo sapiens
taagtccctgctgcccttccccttcccacactgtccattcttcctcccat

SEQ ID NO: 2343 - DNA, 50 bp, Homo sapiens
tgatgtgattgtagctttttaaactatgaaacccctgagagattgtacct

SEQ ID NO: 2344 - DNA, 50 bp, Homo sapiens
cccaaaggttcctaagcctggctgcaaagaagaatcaacagggacacttt

SEQ ID NO: 2345 - DNA, 50 bp, Homo sapiens
tagaagtttgctttttccctgcctgtcttggtcactaccacctcttccct

SEQ ID NO: 2346 - DNA, 50 bp, Homo sapiens
tgaccagcactgtctcagtttcactttcacatagatgtccctttcttggc

SEQ ID NO: 2347 - DNA, 50 bp, Homo sapiens
ctgcccatctcagcctcaccatcaccctgctaatgactgccagactgtgg

SEQ ID NO: 2348 - DNA, 50 bp, Homo sapiens
ttcctgaagctgttcccactcccagatggttttatcaatagcctagaggt

SEQ ID NO: 2349 - DNA, 50 bp, Homo sapiens
ggattacctttccttgtaaagaggatgctgccttaagaattgcatgttgt

SEQ ID NO: 2350 - DNA, 50 bp, Homo sapiens
gggtctttggtgtttttaaatgattgtttcttcttcatgcttttgcttgc

SEQ ID NO: 2351 - DNA, 50 bp, Homo sapiens
catggggcgggggcgggaccagggagaattaataaagttctggacttttg

SEQ ID NO: 2352 - DNA, 50 bp, Homo sapiens
atttaaagcacagtttgtttttctgtcacctatagagtgcaagaatgcac

SEQ ID NO: 2353 - DNA, 50 bp, Homo sapiens
cagcactgtctccagataggaacatgcacaaagcagttaattaggcagcc

SEQ ID NO: 2354 - DNA, 50 bp, Homo sapiens
ctcccctcccattcctctggtccctgccttggtcccttgcctgggaagag

SEQ ID NO: 2355 - DNA, 50 bp, Homo sapiens
aaggttggttaaaagatggcagaaagaagatgaaaataaataagcctggt

SEQ ID NO: 2356 - DNA, 50 bp, Homo sapiens
ctcatcaccggttctgtgcctgtgctctgttgtgttggagggaaggactg

SEQ ID NO: 2357 - DNA, 50 bp, Homo sapiens
tttgcttggcaacacgacttgaaataaataaaactttgtttcttaggaga

SEQ ID NO: 2358 - DNA, 50 bp, Homo sapiens
aaaagaaatctgtttcaacagatgaccgtgtacaataccgtgtggtgaaa

SEQ ID NO: 2359 - DNA, 50 bp, Homo sapiens
gacgccacacaccattttcagatgccgttgcaattaaatcttgccacact

SEQ ID NO: 2360 - DNA, 50 bp, Homo sapiens
atgttttagtaacagttggctgtaatcactcctcgccgtgtctggcactg

SEQ ID NO: 2361 - DNA, 50 bp, Homo sapiens
agttctgcgtttggcatcttcactctttccaaaatgtatctgtacatcag

SEQ ID NO: 2362 - DNA, 50 bp, Homo sapiens
tgtgtttgcagagctagtggatgtgtttgtctacaagtatgattgctgtt

SEQ ID NO: 2363 - DNA, 50 bp, Homo sapiens
aaatctggggaagaggttttatttacattttagggtgggtaagaaagcca

SEQ ID NO: 2364 - DNA, 50 bp, Homo sapiens
cagagcggaggctgggatctagcgagagagatgcagaagatgtgaagaaa

SEQ ID NO: 2365 - DNA, 50 bp, Homo sapiens
cgtttggaggggcggtttctggtagttgtggcttttatgctttcaaagaa

SEQ ID NO: 2366 - DNA, 50 bp, Homo sapiens
ggggtgggagggatggggagtcggttagtcattgatagaactactttgaa

SEQ ID NO: 2367 - DNA, 50 bp, Homo sapiens
tgcagaaacagaaaggttttcttctttttgcttcaaaaacattcttacat

SEQ ID NO: 2368 - DNA, 50 bp, Homo sapiens
agattaactgctggacctcctacctgcattatctcattctggcttccttg

SEQ ID NO: 2369 - DNA, 50 bp, Homo sapiens
ctttgtggttttaaagacaactgtgaaataaaattgtttcaccgcctggt

SEQ ID NO: 2370 - DNA, 50 bp, Homo sapiens
gaactcagctgggttggtgaattaactaatggaagacatgaaattgttcc

SEQ ID NO: 2371 - DNA, 50 bp, Homo sapiens
acgatgatggttacccttcatggacgtcttaatcttccacacacatcccc

SEQ ID NO: 2372 - DNA, 50 bp, Homo sapiens
ttcagttctaataatgtccttaaattttatttccagctcctgttccttgg

SEQ ID NO: 2373 - DNA, 50 bp, Homo sapiens
gcctttccattccatttattcacactgagtgtcctacaataaacttccgt

SEQ ID NO: 2374 - DNA, 50 bp, Homo sapiens
tgcattatccagaactgaagttgccctacttttaactttgaacttggcta

SEQ ID NO: 2375 - DNA, 50 bp, Homo sapiens
gcccagtaagacactcatgtggctagtgtttgccgaatgaaactcaactc

SEQ ID NO: 2376 - DNA, 50 bp, Homo sapiens
taagtcttatgccaaattcagtgctactcctcgttacatgacatacaact

SEQ ID NO: 2377 - DNA, 50 bp, Homo sapiens
aagtgagtggacagcctttgtgtgtatctctccaataaagctctgtgggc

SEQ ID NO: 2378 - DNA, 50 bp, Homo sapiens
tctccaagtctttggttgaagagaagatatatgactgttgagtgtgctct

SEQ ID NO: 2379 - DNA, 50 bp, Homo sapiens
ggggaattgtcgcctcctgctcttttgttactgagtgagataaggttgtt

SEQ ID NO: 2380 - DNA, 50 bp, Homo sapiens; identical to SEQ ID NO: 1624

SEQ ID NO: 2381 - DNA, 50 bp, Homo sapiens
cgggcactgggtggggcagggcacgagttatttaaaacagttacactgca

SEQ ID NO: 2382 - DNA, 50 bp, Homo sapiens
cggacatcttttccgttgcggtttgagaatgttcctataataaacccctc

SEQ ID NO: 2383 - DNA, 50 bp, Homo sapiens
tttggcctgttttgatgtatgtgtgaaacaatgttgtccaacaataaaca

SEQ ID NO: 2384 - DNA, 50 bp, Homo sapiens
agcgagctgctctgctatgtccttaagccaatatttactcatcaggtcat

SEQ ID NO: 2385 - DNA, 50 bp, Homo sapiens
tgtagttggggtagattatgatttaggaagcaaaagtaagaagcagcatt

SEQ ID NO: 2386 - DNA, 50 bp, Homo sapiens
gcgatggacagactcacaacctgaacctaggagtgccccattcttttgta

SEQ ID NO: 2387 - DNA, 50 bp, Homo sapiens
gctcaggagggtacaagctccagaacagtaaccaagtgggaaaataaaga

SEQ ID NO: 2388 - DNA, 50 bp, Homo sapiens
ctggattcatgcagccagctttgcaggttatcagagatcaaagattgtaa

SEQ ID NO: 2389 - DNA, 50 bp, Homo sapiens; identical to SEQ ID NO: 1809

SEQ ID NO: 2390 - DNA, 50 bp, Homo sapiens
ctgtggaaaaatatttaagatagttttgccagaacagtttgtacagacgt

SEQ ID NO: 2391 - DNA, 50 bp, Homo sapiens
actctcaaataattaaaaaggactgtattgttgaacagagggacaattgt

SEQ ID NO: 2392 - DNA, 50 bp, Homo sapiens
aactcatgggaataattgtgagtcagcgtaacatttcaagagtctaaagg

SEQ ID NO: 2393 - DNA, 50 bp, Homo sapiens
tgctcctgttctgtcacttgtcatggtctttcttggtattaaaggccacc

SEQ ID NO: 2394 - DNA, 50 bp, Homo sapiens
ggggttgtaaatatcaactattcaacagtttaggatgcaattacgagtgt

SEQ ID NO: 2395 - DNA, 50 bp, Homo sapiens
aatcttatgtttccaagagaactaaagctggagagacctgacccttctct

SEQ ID NO: 2396 - DNA, 50 bp, Homo sapiens
tgcaccaggtgttggaaaaacacaattatggtaaaataaagtgttctcct

SEQ ID NO: 2397 - DNA, 50 bp, Homo sapiens
aatgggcacacagggaacaggaaatgggaatgagagcaagggttgggttg

SEQ ID NO: 2398 - DNA, 50 bp, Homo sapiens
tcttcttcatctctgttttgctcttaaaaatataaaaaggcaattccccg

SEQ ID NO: 2399 - DNA, 50 bp, Homo sapiens
agatgtaacccaccttgaccataaattggcttttcatagtgctcagatgt

SEQ ID NO: 2400 - DNA, 50 bp, Homo sapiens
ctaggctctgggcacatttcctgttcttgaattctgctcctgaagagggt

SEQ ID NO: 2401 - DNA, 50 bp, Homo sapiens
taccctgcccctctttttcggtttgtttttattctttcatttttacaagg

SEQ ID NO: 2402 - DNA, 50 bp, Homo sapiens
gctgcctaacttatccatctttgaacttctgactacttgttgtatctgct

SEQ ID NO: 2403 - DNA, 50 bp, Homo sapiens
cctttaaaacaataaggcgctttcattttgcactctaacttaagagtttt

SEQ ID NO: 2404 - DNA, 50 bp, Homo sapiens
tcctgcctcctgcggctgttggatttgggaatgaccttggtgagagtctc

SEQ ID NO: 2405 - DNA, 50 bp, Homo sapiens
atactctgagctgtggactgaactggcagacacaacctgtacagattgaa

SEQ ID NO: 2406 - DNA, 50 bp, Homo sapiens
aaggaattatgtggtcagtgcattgttttttaaactggaaatcattttgt

SEQ ID NO: 2407 - DNA, 50 bp, Homo sapiens
tgctcttaaaaccagggagtcagatatatttgtaaggttaaatcattggt

SEQ ID NO: 2408 - DNA, 50 bp, Homo sapiens
gccaaaaatctgtcttgaaggcagctacactttgaagtggtctttgaata

SEQ ID NO: 2409 - DNA, 50 bp, Homo sapiens; identical to SEQ ID NO: 651

SEQ ID NO: 2410 - DNA, 50 bp, Homo sapiens
tgactatctgtaatggatcaattttggatatgactttgggtgggggtaaa

SEQ ID NO: 2411 - DNA, 50 bp, Homo sapiens; identical to SEQ ID NO: 1839

SEQ ID NO: 2412 - DNA, 50 bp, Homo sapiens
ggtagtgcctccaggggcagaggaaaagaagaagtgttactgcattttgt

SEQ ID NO: 2413 - DNA, 50 bp, Homo sapiens
atggtcagattagatgcaagaataaagcagttgtccgagtctaagtttct

SEQ ID NO: 2414 - DNA, 50 bp, Homo sapiens
tggtattctgttctgaagtctaggatatttttcagcctataaagccccct

SEQ ID NO: 2415 - DNA, 50 bp, Homo sapiens
acttacccagatgttgcttttgaaaagttgaaatgtgtaattgttttgga

SEQ ID NO: 2416 - DNA, 50 bp, Homo sapiens
agcggactcaggctccagctgtggctacaacatagggtttttatacaaga

SEQ ID NO: 2417 - DNA, 50 bp, Homo sapiens
ttattgtggcaaatgttgtctgacttactgtttcaacaaaccagaagaca

SEQ ID NO: 2418 - DNA, 50 bp, Homo sapiens
tggacagtagcattagaattgtggaaaaggaacacgcaaagggagaagtg

SEQ ID NO: 2419 - DNA, 50 bp, Homo sapiens
ctggtaaattttgtgcttatcttcaaggctggcttaagtataaaattgtt

SEQ ID NO: 2420 - DNA, 50 bp, Homo sapiens
ccctggctccttcagacacgtgcttgatgctgagcaagttcaataaagat

SEQ ID NO: 2421 - DNA, 50 bp, Homo sapiens
gttaacttccaggagttcctcattctggtgataaagatgggctggcagcc

SEQ ID NO: 2422 - DNA, 50 bp, Homo sapiens
cctgtctcgtggcaacaaggctatgttctgttaggagttaccttaaactg

SEQ ID NO: 2423 - DNA, 50 bp, Homo sapiens
agtcagatctttctccttgaatatctttcgataaacaacaaggtggtgtg

SEQ ID NO: 2424 - DNA, 50 bp, Homo sapiens; identical to SEQ ID NO: 1861

SEQ ID NO: 2425 - DNA, 50 bp, Homo sapiens
ccacgggtgatgcttccaggggttctggcgggagtctcagccgaagagag

SEQ ID NO: 2426 - DNA, 50 bp, Homo sapiens; identical to SEQ ID NO: 150

SEQ ID NO: 2427 - DNA, 50 bp, Homo sapiens
accagactgacaaatgtgtatcggatgcttttgttcagggctgtgatcgg

SEQ ID NO: 2428 - DNA, 50 bp, Homo sapiens; identical to SEQ ID NO: 1685

SEQ ID NO: 2429 - DNA, 50 bp, Homo sapiens
cgaagaagagccacagtgagggagatcccatccccttgtctgaactggag

SEQ ID NO: 2430 - DNA, 50 bp, Homo sapiens
gacctgatacggctccccagtacaccccacctcttccttgtaaatatgat

SEQ ID NO: 2431 - DNA, 50 bp, Homo sapiens
ctcaagcgtcctgggatctccttctccctcctgtcctgtccttgcccctc

SEQ ID NO: 2432 - DNA, 50 bp, Homo sapiens
cctcaagggaggagtgatcttcaccaccaagaagggccagcagttctgtg

SEQ ID NO: 2433 - DNA, 50 bp, Homo sapiens
tcctgtgtgtcatgttggtttttggtacttgtattgtcatttggagaaac

SEQ ID NO: 2434 - DNA, 50 bp, Homo sapiens
tcctgtgatggaaatacaactggtatcttcacttttttaggaattgggaa

SEQ ID NO: 2435 - DNA, 50 bp, Homo sapiens
aatttgcagtaaacttttaattaaatgctcatctggtaactcaacacccc

SEQ ID NO: 2436 - DNA, 50 bp, Homo sapiens
gctgcttttgaggagaaaatatatagctttggacacgaggaagatctaga

SEQ ID NO: 2437 - DNA, 50 bp, Homo sapiens
aaacgcttggagtgcttctgaatatacagaagttccatttaagggcaagt

SEQ ID NO: 2438 - DNA, 50 bp, Homo sapiens
tgcatcgtgtttctacctttagtaccttgccactcttttaaaacgctgct

SEQ ID NO: 2439 - DNA, 50 bp, Homo sapiens; identical to SEQ ID NO: 196

SEQ ID NO: 2440 - DNA, 50 bp, Homo sapiens
agacctttctttgggactgtgtggaccaaggagcttccatctagtgacaa

SEQ ID NO: 2441 - DNA, 50 bp, Homo sapiens
gctcagtaacataactgcttcttggagctttggaatattttatcctgtat

SEQ ID NO: 2442 - DNA, 50 bp, Homo sapiens; identical to SEQ ID NO: 1855

SEQ ID NO: 2443 - DNA, 50 bp, Homo sapiens
cgggccttgcatataaataacggagcatacagtgagcacatctagctgat

SEQ ID NO: 2444 - DNA, 50 bp, Homo sapiens
agagatgcctttgtttgatgagattcaaacttgatgctatgctttaaaat

SEQ ID NO: 2445 - DNA, 50 bp, Homo sapiens
agtcccattcttccttttcaatacctacccccaaatcttctcctaaccct

SEQ ID NO: 2446 - DNA, 50 bp, Homo sapiens
tgtcacactggctatcaaagaataagaaaattattgagtatgagtgtgtt

SEQ ID NO: 2447 - DNA, 50 bp, Homo sapiens
gcaaaacccagaagctaaaaagtcaataaacagaaagaatgattttgaga

SEQ ID NO: 2448 - DNA, 50 bp, Homo sapiens
ttgtgaccaaatgggcctcaaagattcagattgaaacaaacaaaaagctt

SEQ ID NO: 2449 - DNA, 50 bp, Homo sapiens
aaggttctattaaccacttctaagggtacacctccctccaaactactgca

SEQ ID NO: 2450 - DNA, 50 bp, Homo sapiens
gttgtatcacccccgagttagcatatcccaggctcgcagactcaacacag

SEQ ID NO: 2451 - DNA, 50 bp, Homo sapiens
ccacttgagtttgtcctccaagggtaggtgtctcatttgttctggcccct

SEQ ID NO: 2452 - DNA, 50 bp, Homo sapiens
tcctgtctctctcctccttactcttggataaataaacagcctgtgagcac

SEQ ID NO: 2453 - DNA, 50 bp, Homo sapiens
cctgaccctctttgaattaagtggactgtggcatgacattctgcaatact

SEQ ID NO: 2454 - DNA, 50 bp, Homo sapiens
tctaaactttattttcaaaagcttaaggcccaaatacaaacttctctgga

SEQ ID NO: 2455 - DNA, 50 bp, Homo sapiens
catggtgatagcctgaaagagctttcctcactagaaaccaaatggtgtaa

SEQ ID NO: 2456 - DNA, 50 bp, Homo sapiens
ggagaaggattagaaagttatgtggcagataaagaattccatgcacctct

SEQ ID NO: 2457 - DNA, 50 bp, Homo sapiens
acagtttttcttttgaatttagtatttgagatgagttgttgggacatgca

SEQ ID NO: 2458 - DNA, 50 bp, Homo sapiens
gatctagtctgttacaccatttagaactttcctcagccattatcagtcat

SEQ ID NO: 2459 - DNA, 50 bp, Homo sapiens
agcatggtaagttcccttagctatatgaattttggcatgtttcagagaga

SEQ ID NO: 2460 - DNA, 50 bp, Homo sapiens
acatttttattctttctactgagggcattgtctgttttctttgtaaatgc

SEQ ID NO: 2461 - DNA, 50 bp, Homo sapiens
aaaaggaaaaccgaattaggtccacttcaatgtccacctgtgagaaagga

SEQ ID NO: 2462 - DNA, 50 bp, Homo sapiens
cctatccccggatgtgtgagaataatgtgttcataaagcatggatctcgt

SEQ ID NO: 2463 - DNA, 50 bp, Homo sapiens
ccagtgtctattctgggttagagaagtgcttactaaggggttttctaata

SEQ ID NO: 2464 - DNA, 50 bp, Homo sapiens
gggtgatctgcttttatctaaatgcaaataaggatgtgttctctgagacc

SEQ ID NO: 2465 - DNA, 50 bp, Homo sapiens; identical to SEQ ID NO: 1748

SEQ ID NO: 2466 - DNA, 50 bp, Homo sapiens
gagccaatccactccttcctttctatcattcccctgcccacctccttcca

SEQ ID NO: 2467 - DNA, 50 bp, Homo sapiens; identical to SEQ ID NO: 184

SEQ ID NO: 2468 - DNA, 50 bp, Homo sapiens
gctgctgccaccgcttcctgcctgtcatttgaataaacagtgtttctatt

SEQ ID NO: 2469 - DNA, 50 bp, Homo sapiens
tgggactcatccaaaagggacgagaagaaagaagaaggaacctgattcgg

SEQ ID NO: 2470 - DNA, 50 bp, Homo sapiens
tcaagactgcctttatgctggatcatgtgctactggtataaagttctggc

SEQ ID NO: 2471 - DNA, 50 bp, Homo sapiens
gtacacccctcaaccctatgcagcctggagtgggcatcaataaaatgaac

SEQ ID NO: 2472 - DNA, 50 bp, Homo sapiens
ccatgagactgatccctggccactgaaaagctttcctgacaataaaaatg

SEQ ID NO: 2473 - DNA, 50 bp, Homo sapiens
ttgggaagtgaccatttctaggcttatacataatagcaataataaaggct

SEQ ID NO: 2474 - DNA, 50 bp, Homo sapiens
atgtggtaaaacccagaaagcatccatcatgaatgcaagatactttcaat

SEQ ID NO: 2475 - DNA, 50 bp, Homo sapiens
ttcacattgtattcagagttgatggttgtacatataagtgattgctggtt

SEQ ID NO: 2476 - DNA, 50 bp, Homo sapiens
gccactggtttctcagaatccaaagatcacatattctagtgtaacactgc

SEQ ID NO: 2477 - DNA, 50 bp, Homo sapiens
ctgtgctttttgcttgggataatggagtttttctttagaaacagtgccaa

SEQ ID NO: 2478 - DNA, 50 bp, Homo sapiens
tatcagactagtgacaagctcctggtcttgagatgtcttctcgttaagga

SEQ ID NO: 2479 - DNA, 50 bp, Homo sapiens
agggcttgaggtgaatttcattaaatggaataatatgatgccactttgca

SEQ ID NO: 2480 - DNA, 50 bp, Homo sapiens
ttgacctcccatttttactatttgccaatacctttttctaggaatgtgct

SEQ ID NO: 2481 - DNA, 50 bp, Homo sapiens
agcgggaaggattttgggtaaatctgagagctgcgataaagtcctaggtt

SEQ ID NO: 2482 - DNA, 50 bp, Homo sapiens
tgatgtttgatggacctatgaatctatttagggagacacagatggctggg

SEQ ID NO: 2483 - DNA, 50 bp, Homo sapiens
agccctgaggatgaacaacctcagagaagaggtggtttagagcaaggaaa

SEQ ID NO: 2484 - DNA, 50 bp, Homo sapiens; identical to SEQ ID NO: 1844

SEQ ID NO: 2485 - DNA, 50 bp, Homo sapiens; identical to SEQ ID NO: 1453

SEQ ID NO: 2486 - DNA, 50 bp, Homo sapiens
gcgggggtggacagggaggcagcttgtgaatttttgttttactgtttaac

SEQ ID NO: 2487 - DNA, 50 bp, Homo sapiens
aacttcagatacttgtgaacatgccttatatttgtccaacaactgtcaga

SEQ ID NO: 2488 - DNA, 50 bp, Homo sapiens
gaagggttggcctgcctggctggggaggtcagtaaactttgaatagtaag

SEQ ID NO: 2489 - DNA, 50 bp, Homo sapiens
aagatgtacccttcaggtgaacctggtatcagacccacagtacttgctgt

SEQ ID NO: 2490 - DNA, 50 bp, Homo sapiens; identical to SEQ ID NO: 1733

SEQ ID NO: 2491 - DNA, 50 bp, Homo sapiens
agtggaatgttctatccccacaagaaggattatatcttatagacttgtct

SEQ ID NO: 2492 - DNA, 50 bp, Homo sapiens
cccgtggccctggagcctcaataaagtgtccctttcattgactggagcag

SEQ ID NO: 2493 - DNA, 50 bp, Homo sapiens
ttatgcatttatcacttccaaatctaactttgcacaagtaacccatgtaa

SEQ ID NO: 2494 - DNA, 50 bp, Homo sapiens
tccgcactatataattcgcacacattaattagggtttatgtaccatacaa

SEQ ID NO: 2495 - DNA, 50 bp, Homo sapiens
gcttgtgaccattttgtatggcttgtctggaaacttctgtaaatcttatg

SEQ ID NO: 2496 - DNA, 50 bp, Homo sapiens
tgctgatttatgcaaagggctggcattctgatgcttttcaggtttaatcc

SEQ ID NO: 2497 - DNA, 50 bp, Homo sapiens
tgcattctggcagttcttttaggattataggttgcaaattatccaaatat

SEQ ID NO: 2498 - DNA, 50 bp, Homo sapiens
ccgacagcccagcctagcccacttgtcatccataaagcaagctcaacctt

SEQ ID NO: 2499 - DNA, 50 bp, Homo sapiens
tttgctgttagtcgggttagagttggctctacgcgaggtttgttaataaa

SEQ ID NO: 2500 - DNA, 50 bp, Homo sapiens
cagactgctagtgttctgtctaaaaaccagacaaggaaatacccttcttt

SEQ ID NO: 2501 - DNA, 50 bp, Homo sapiens
ttttccagtgaggtaaaataaggcataaatgcaggtaattattcccagct

SEQ ID NO: 2502 - DNA, 50 bp, Homo sapiens
ccggcacttctagtggtctcacctggaggcaagagggagggtacagagcc

SEQ ID NO: 2503 - DNA, 50 bp, Homo sapiens; identical to SEQ ID NO: 1701

SEQ ID NO: 2504 - DNA, 50 bp, Homo sapiens; identical to SEQ ID NO: 1264

SEQ ID NO: 2505 - DNA, 50 bp, Homo sapiens
tttccagcaagtatccaaccaacttggttctgcttcaataaatctttgga

SEQ ID NO: 2506 - DNA, 50 bp, Homo sapiens
atgacttgcatcccagctttccaccaaccaaattcaaacattcactgctt

SEQ ID NO: 2507 - DNA, 50 bp, Homo sapiens
tgtatgagactttttgttgcaaaggacacatttatcatattcattcacac

SEQ ID NO: 2508 - DNA, 50 bp, Homo sapiens
tgatctgtccagtgtcactctgtaccctcaacatatatcccttgtgcgat

SEQ ID NO: 2509 - DNA, 50 bp, Homo sapiens
aattcacccctcccacctctttcttcaattaatggaaaagcgttaaggga

SEQ ID NO: 2510 - DNA, 50 bp, Homo sapiens
ctcagtactttgcagaaaacaccaaacaaaaatgccattttaaaaaaggt

SEQ ID NO: 2511 - DNA, 50 bp, Homo sapiens
agccttcagtcagagctcaaaccttagtcaacaccagagaattcacatga

SEQ ID NO: 2512 - DNA, 50 bp, Homo sapiens
aaccctctaagaatacctgtttaagtcttgagtgttgaaaggaattgttt

SEQ ID NO: 2513 - DNA, 50 bp, Homo sapiens; identical to SEQ ID NO: 652

SEQ ID NO: 2514 - DNA, 50 bp, Homo sapiens
tcaggagtgggttgatttcagcacctacagtgtacagtcttgtattaagt

SEQ ID NO: 2515 - DNA, 50 bp, Homo sapiens
ccttcagttatactttcaatgaccttttgtgcatctgttaaggcaaaaca

SEQ ID NO: 2516 - DNA, 50 bp, Homo sapiens
aagtgaacaaaataagcaactaaatgagacctaataattggccttcgatt

SEQ ID NO: 2517 - DNA, 50 bp, Homo sapiens
cacaaccaaatttgatgcgatctgctcagtaatataatttgccattttta

SEQ ID NO: 2518 - DNA, 50 bp, Homo sapiens
acattgtaatagaaacagatttcccaaattccagcctggcatgaggtaat

SEQ ID NO: 2519 - DNA, 50 bp, Homo sapiens
cagactgaatagatcttaactgtctcctacatgtgtgttttcaaatgtgt

SEQ ID NO: 2520 - DNA, 50 bp, Homo sapiens
gatatcccagcggtggtacttcggagacacctgtctgcatctgactgagc

SEQ ID NO: 2521 - DNA, 50 bp, Homo sapiens
acactttcctctgcctttttctcttatatgtgggttcatggttcagttcg

SEQ ID NO: 2522 - DNA, 50 bp, Homo sapiens
agataatgtcaccagtcctcttccttcacttcttgttgtaattgcagcca

SEQ ID NO: 2523 - DNA, 50 bp, Homo sapiens
ccggcacacagggactaggtctagtgagaacatcaggagcagccagggat

SEQ ID NO: 2524 - DNA, 50 bp, Homo sapiens
catcgggttttgggtgtgtgttttcatagcgtggttactttctataatgc

SEQ ID NO: 2525 - DNA, 50 bp, Homo sapiens
atgtatttctttctgactagacttgtgatatgcgtgtgtttatgtacaga

SEQ ID NO: 2526 - DNA, 50 bp, Homo sapiens
gttctgtatcagttgaatttttgtgctcttttccctgtgtacgtggtggt

SEQ ID NO: 2527 - DNA, 50 bp, Homo sapiens
catttatgagttccatgatatgtggtctaagaaagaccaaacagatttct

SEQ ID NO: 2528 - DNA, 50 bp, Homo sapiens
aaatcggttgggtaccatgctttttctccccttcacgtttgcagttgatg

SEQ ID NO: 2529 - DNA, 50 bp, Homo sapiens
gttcatgttggaaagaatgaaaacaacttcaagttcataggcagccagcc

SEQ ID NO: 2530 - DNA, 50 bp, Homo sapiens
tgtcatttaaagacatcaggttcatctgtttactgagctagaaacatagt

SEQ ID NO: 2531 - DNA, 50 bp, Homo sapiens
atctggtgccaaatgaagatttttaggagtgattactaattatcaagggc

SEQ ID NO: 2532 - DNA, 50 bp, Homo sapiens
ttctgcactgggaggtgtaatacatcacaaagacaaagaaaacgcatact

SEQ ID NO: 2533 - DNA, 50 bp, Homo sapiens
agttgaaggaaaatgttcatgttcatatgtacttgtttgctatgactaca

SEQ ID NO: 2534 - DNA, 50 bp, Homo sapiens
cactggggaagtcaagaatggggcctggggctctcagggagaactgcttc

SEQ ID NO: 2535 - DNA, 50 bp, Homo sapiens
ccctagatacagcagtttatacccacacacctgtctacagtgtcattcaa

SEQ ID NO: 2536 - DNA, 50 bp, Homo sapiens
gaaagtgcttagctctctccctcctgacctctgggcagccagtcatcaaa

SEQ ID NO: 2537 - DNA, 50 bp, Homo sapiens
atcatgtatgcaatactttccccctttttgctttgctaaccaaagagcat

SEQ ID NO: 2538 - DNA, 50 bp, Homo sapiens
ctgctgtctcttcagtctgctccatccatcacccatttacccatctctca

SEQ ID NO: 2539 - DNA, 50 bp, Homo sapiens
tatagaaaatgtacagttgtgtgaatgtgaaataaatgtcctcaactccc

SEQ ID NO: 2540 - DNA, 50 bp, Homo sapiens
ggccgtgttcaaagagcaatattccagtaaatgcagactgctgcaaagct

SEQ ID NO: 2541 - DNA, 50 bp, Homo sapiens; identical to SEQ ID NO: 689

SEQ ID NO: 2542 - DNA, 50 bp, Homo sapiens
gaactgacttcaaaggcagcttctggacaggtggtgggaggggacccttc

SEQ ID NO: 2543 - DNA, 50 bp, Homo sapiens
ggagaggctctgtttccagccagttagttttctctgggagacttctctgt

SEQ ID NO: 2544 - DNA, 50 bp, Homo sapiens
tttctattccatacttctgcccacgttgttttctctcaaaatccattcct

SEQ ID NO: 2545 - DNA, 50 bp, Homo sapiens
cctgtacacagccgagcagcatttccgttgaaggacttgcatccccattg

SEQ ID NO: 2546 - DNA, 50 bp, Homo sapiens
ttgatgcttagtggaatgtgtgtctaacttgctctctgacatttagcaga

SEQ ID NO: 2547 - DNA, 50 bp, Homo sapiens
aagaagttaacatgaactcttgaagtcacaccagggcaactcttggaaga

SEQ ID NO: 2548 - DNA, 50 bp, Homo sapiens
ggtggatctccaaccaggccagagaagattctcacagaaggttttgaact

SEQ ID NO: 2549 - DNA, 50 bp, Homo sapiens; identical to SEQ ID NO: 63

SEQ ID NO: 2550 - DNA, 50 bp, Homo sapiens
ggttcgctctactatggagatcaacagttactgtgactgagtcggcccat

SEQ ID NO: 2551 - DNA, 50 bp, Homo sapiens
gctcacactcagcgtgggaccccgaatgttaagcaatgataataaagtat

SEQ ID NO: 2552 - DNA, 50 bp, Homo sapiens
ctgctcgcccctatcgctccagccaaggcgaagaagcacgaacgaatgtc

SEQ ID NO: 2553 - DNA, 50 bp, Homo sapiens
acctgccaccatgttttgtaatttgaggtcttgatttcaccattgtcggt

SEQ ID NO: 2554 - DNA, 50 bp, Homo sapiens
aacgaaaggaagttctgttggaagcatctgaagaaactggaaagagggtt

SEQ ID NO: 2555 - DNA, 50 bp, Homo sapiens
acatttacctgaatgttgtctgaggactgaactgtggactttactattca

SEQ ID NO: 2556 - DNA, 50 bp, Homo sapiens
aaatccagctgcagaaacagacaccccaatgctatttacatacagctcta

SEQ ID NO: 2557 - DNA, 50 bp, Homo sapiens
ccccgttcctcacttttcccttttcattcccaccccctagactttgattt

SEQ ID NO: 2558 - DNA, 50 bp, Homo sapiens
ttcaggcactaagaggggctggacctggcggcaggaagccaaagagactg

SEQ ID NO: 2559 - DNA, 50 bp, Homo sapiens
cgcaacaatccatctctcaagtagtgtatcacagtagtagcctccaggtt

SEQ ID NO: 2560 - DNA, 50 bp, Homo sapiens
cccaggctagggggctatagaaacatctagaaatagactgaaagaaaatc

SEQ ID NO: 2561 - DNA, 50 bp, Homo sapiens
acctacaaaaaagttactgtggtatctatgagttatcatcttagctgtgt

SEQ ID NO: 2562 - DNA, 50 bp, Homo sapiens
tggtgtttagtggataccacatcggaagtgattttctaaattggatttga

SEQ ID NO: 2563 - DNA, 50 bp, Homo sapiens
tcactatctttctgataacagaattgccaaggcagcgggatctcgtatct

SEQ ID NO: 2564 - DNA, 50 bp, Homo sapiens
gaaaagatggagaaaatgaacaggacatggggctcctggaaagaaagggc

SEQ ID NO: 2565 - DNA, 50 bp, Homo sapiens
gtggttttaggatgtcattctttgcagttcttcatcatgagacaagtctt

SEQ ID NO: 2566 - DNA, 50 bp, Homo sapiens
aagggtgaggatgagaagtggtcacgggatttattcagccttggtcagag

SEQ ID NO: 2567 - DNA, 50 bp, Homo sapiens
gagaagattcaggacctcttggtggactctggaaagttcatctacttaga

SEQ ID NO: 2568 - DNA, 50 bp, Homo sapiens
agtacaactggaagccaaaacaaggtggaagatgtcctgaattaagacgt

SEQ ID NO: 2569 - DNA, 50 bp, Homo sapiens
gttgctggcctaatgagcaatgttctcaattttcgttttcattttgctgt

SEQ ID NO: 2570 - DNA, 50 bp, Homo sapiens
acagacctccagaggggacttatggaaaagctgacacctaagtttaccaa

SEQ ID NO: 2571 - DNA, 50 bp, Homo sapiens; identical to SEQ ID NO: 1736

SEQ ID NO: 2572 - DNA, 50 bp, Homo sapiens
tggctttatgtccattttaccactgtttttatccaataaactaagtcggt

SEQ ID NO: 2573 - DNA, 50 bp, Homo sapiens; identical to SEQ ID NO: 688

SEQ ID NO: 2574 - DNA, 50 bp, Homo sapiens
cctttaaggttggaactttgaagttggagaaggtggaataaagttacacc

SEQ ID NO: 2575 - DNA, 50 bp, Homo sapiens
tgccttcgggttgtgctttagtctgtaaaattctaaaggagagctgctaa

SEQ ID NO: 2576 - DNA, 50 bp, Homo sapiens
gcaaaaacctgggaccagcccccttctcccacaaataaagcccaataaag

SEQ ID NO: 2577 - DNA, 50 bp, Homo sapiens
gtcatcggctttcagagggagaccacgggaatgttcagggaaacaatgtc

SEQ ID NO: 2578 - DNA, 50 bp, Homo sapiens
tgaattgcctgttcagggttccttatgcagagaaataaagcagattcagg

SEQ ID NO: 2579 - DNA, 50 bp, Homo sapiens
accaaccacctttccagccatagagattttaattagcccaactagaagcc

SEQ ID NO: 2580 - DNA, 50 bp, Homo sapiens
ctactttgtatgatgaccctgtcctccctcacccaggctgcagtgccatg

SEQ ID NO: 2581 - DNA, 50 bp, Homo sapiens
aaagaggagtggtttgtgacaagcggaatccaaatggcattcgagtggct

SEQ ID NO: 2582 - DNA, 50 bp, Homo sapiens
gaagagccatctcaacagaatcgcaccaaactatactttcaggatgaatt

SEQ ID NO: 2583 - DNA, 50 bp, Homo sapiens
tctgggttgtagagaactctttgtaagcaataaagtttggggtgatgaca

SEQ ID NO: 2584 - DNA, 50 bp, Homo sapiens
ctgctgtccactttccttcaggctctgtgaatacttcaacctgctgtgat

SEQ ID NO: 2585 - DNA, 50 bp, Homo sapiens
gcacctgctccaaaggcatctggcaagaaagcataagtggcaatcataaa

SEQ ID NO: 2586 - DNA, 50 bp, Homo sapiens; identical to SEQ ID NO: 1657

SEQ ID NO: 2587 - DNA, 50 bp, Homo sapiens
agctgccagaaagcacagatttgacccaagctatttatatgttataaagt

SEQ ID NO: 2588 - DNA, 50 bp, Homo sapiens; identical to SEQ ID NO: 1829

SEQ ID NO: 2589 - DNA, 50 bp, Homo sapiens
gatgaggctgacaaagttggggctgagaacacaatcacctattcacttct

SEQ ID NO: 2590 - DNA, 50 bp, Homo sapiens
tcctgcccccgccctgctgtatgatattaatgtggaaggtcatcaataaa

SEQ ID NO: 2591 - DNA, 50 bp, Homo sapiens
aaactgtaaatcataatgtaactgaagcataaacatcacatggcatgttt

SEQ ID NO: 2592 - DNA, 50 bp, Homo sapiens
acaaggacgctggctactgtctattaaaattctgatgtttctgtgaaatt

SEQ ID NO: 2593 - DNA, 50 bp, Homo sapiens
cttccttatggagctggagcagcccgcctagaacccagtctaatgagaac

SEQ ID NO: 2594 - DNA, 50 bp, Homo sapiens
tgcatctcattttgcctaaattggttctgtattcataaacactttccaca

SEQ ID NO: 2595 - DNA, 50 bp, Homo sapiens
agtgaagtctatgatgtgaaacactttgcctcctgtgtactgtgtcataa

SEQ ID NO: 2596 - DNA, 50 bp, Homo sapiens
ttgatgatgtaacttgaccttccagagttatggaaattttgtccccatgt

SEQ ID NO: 2597 - DNA, 50 bp, Homo sapiens
agctcacacgttccacccactgtccctcaaacaatgtcatttcagaaaga

SEQ ID NO: 2598 - DNA, 50 bp, Homo sapiens
ggaccacttttatttattgtcagacacttatttattgggatgtgagcccc

SEQ ID NO: 2599 - DNA, 50 bp, Homo sapiens
gggctgtacccaagctgatttctcatctggtcaataaagctgtttagacc

SEQ ID NO: 2600 - DNA, 50 bp, Homo sapiens
gctctgagggaaacgctgtctgctgccttcatacagatgctgattaaagt

SEQ ID NO: 2601 - DNA, 50 bp, Homo sapiens
ttttagctcaggaaaatatgtcaggctcaaaccacttctcaggcagttta

SEQ ID NO: 2602 - DNA, 50 bp, Homo sapiens
ttgttgaaccataaagtttgcaaagtaaaggttaagtatgaggtcaatgt

SEQ ID NO: 2603 - DNA, 50 bp, Homo sapiens
tgtggtttcagtctctgctagttcatattgcatgtttattttggacagtc

SEQ ID NO: 2604 - DNA, 50 bp, Homo sapiens
agcagaaattttgaagccagaaggacaacatatgaagcttaggagtgaag

SEQ ID NO: 2605 - DNA, 50 bp, Homo sapiens
actgcttcatctccttttgcgcttatttggaaattttagttatagtgttt

SEQ ID NO: 2606 - DNA, 50 bp, Homo sapiens
gagagagtacgggctcagcagccagaggaggccggtgaagtgcatcttct

SEQ ID NO: 2607 - DNA, 50 bp, Homo sapiens
cccagtcaccctcttggagcttccctgctttgaattaaagaccactcatg

SEQ ID NO: 2608 - DNA, 50 bp, Homo sapiens; identical to SEQ ID NO: 2607

SEQ ID NO: 2609 - DNA, 50 bp, Homo sapiens
ggagcgtggcacttacctttgtcccttgcttcattcttgtgagatgataa

SEQ ID NO: 2610 - DNA, 50 bp, Homo sapiens
gcatacacatgcactcagtgtggactgggaagcattactttgtagatgta

SEQ ID NO: 2611 - DNA, 50 bp, Homo sapiens
aagcctcaccattgacttcttccccccatcctcagacattaaagagcctg

SEQ ID NO: 2612 - DNA, 50 bp, Homo sapiens
ctgacctcggcccagcttggactgcacatctggcagctgaggagtcagtg

SEQ ID NO: 2613 - DNA, 50 bp, Homo sapiens
ggaagatcattaaggacggtgagcagcatgaagatctcaatgaagtagcc

SEQ ID NO: 2614 - DNA, 50 bp, Homo sapiens
ttacctctgtcttggctttcatgttattaaacgtatgcatgtgaagaagg

SEQ ID NO: 2615 - DNA, 50 bp, Homo sapiens
agttactggtctctttctgccgaatgttatgttttgcttttatctcacag

SEQ ID NO: 2616 - DNA, 50 bp, Homo sapiens
cacaaagtggcctttggggagaaagtcatgtatttgttcgcaattatgct

SEQ ID NO: 2617 - DNA, 50 bp, Homo sapiens
atttactccaagtcctctccccagctaccaccagtcccttactctgttct

SEQ ID NO: 2618 - DNA, 50 bp, Homo sapiens
gcccatccctgagccaggtaccaccattgtaaggaaacactttcagaaat

SEQ ID NO: 2619 - DNA, 50 bp, Homo sapiens
aggaccgacgcttctggagaaaatacctgcacctgagcttccatgccctg

SEQ ID NO: 2620 - DNA, 50 bp, Homo sapiens
ttcacaaagatttgcgttaatgaagactacacagaaaacctttctaggga

SEQ ID NO: 2621 - DNA, 50 bp, Homo sapiens
atacctgactttagagagagtaaaatgtgccaggagccataggaatatct

SEQ ID NO: 2622 - DNA, 50 bp, Homo sapiens; identical to SEQ ID NO: 679

SEQ ID NO: 2623 - DNA, 50 bp, Homo sapiens
acatccagaaagaaggacacttgtatgctagtctatggtcagttgaggaa

SEQ ID NO: 2624 - DNA, 50 bp, Homo sapiens
ttgactagtaaaagttactgcctagtctttttaccttaggcttacagaat

SEQ ID NO: 2625 - DNA, 50 bp, Homo sapiens
ttgcccaggccagttagaaaatcccttggggaactgtgatgaatattcca

SEQ ID NO: 2626 - DNA, 50 bp, Homo sapiens
ataatcacagttgtgttcctgacactcaataaacagtcactggaaagagt

SEQ ID NO: 2627 - DNA, 50 bp, Homo sapiens
tgaccggattccctcactgttgtatcttgaataaacgctgctgcttcatc

SEQ ID NO: 2628 - DNA, 50 bp, Homo sapiens
ccaaagttggagcttctattgccatgaaccatgcttacaaagaaagcact

SEQ ID NO: 2629 - DNA, 50 bp, Homo sapiens
gtgaactcctgcactggcatttggatgtgtgttaatgctatttgttttgt

SEQ ID NO: 2630 - DNA, 50 bp, Homo sapiens
gctgggtggaaactgctttgcactatcgtttgcttggtgtttgtttttaa

SEQ ID NO: 2631 - DNA, 50 bp, Homo sapiens
gcttgttatcagctttcagggccatggttcacattagaataaaaggtagt

SEQ ID NO: 2632 - DNA, 50 bp, Homo sapiens
ctttgccttgcagccacatggccccatcccagttggggaagccaggtgag

SEQ ID NO: 2633 - DNA, 50 bp, Homo sapiens
tgcgggttattgatttgttctttacaactattgttctcatatttctcaca

SEQ ID NO: 2634 - DNA, 50 bp, Homo sapiens
agttattagttctgctttagctttccaatatgctgtatagcctttgtcat

SEQ ID NO: 2635 - DNA, 50 bp, Homo sapiens
gctgttttcaacattgtatttggactatgcatgtgttttttccccattgt

SEQ ID NO: 2636 - DNA, 50 bp, Homo sapiens
aagtaaatgtacagtgatttgaaatacaataatgaaggcaatgcatggcc

SEQ ID NO: 2637 - DNA, 50 bp, Homo sapiens; identical to SEQ ID NO: 1636

SEQ ID NO: 2638 - DNA, 50 bp, Homo sapiens
tcttaagcaggtttgttttcagcactgatggaaaataccagtgttgggtt

SEQ ID NO: 2639 - DNA, 50 bp, Homo sapiens
ggggttggaaacttagcactttatatttatacagaacattcaggatttgt

SEQ ID NO: 2640 - DNA, 50 bp, Homo sapiens
acccgtgtgaatgtgaagaaaagcagtatgttactggttgttgttgttgt

SEQ ID NO: 2641 - DNA, 50 bp, Homo sapiens
ttgcactgtgagcaaatgctaatacagtaaatatattgtgtttgctgaca

SEQ ID NO: 2642 - DNA, 50 bp, Homo sapiens
aaatgaagtcacacaggacaattattcttatgcctaagttaacagtggat

SEQ ID NO: 2643 - DNA, 50 bp, Homo sapiens
gtcgctgcatatgtgactgtcatgagatcctacttagtatgatcctggct

SEQ ID NO: 2644 - DNA, 50 bp, Homo sapiens
aaggacaaaagttgttgccttcctaagaaccttctttaataaactcattt

SEQ ID NO: 2645 - DNA, 50 bp, Homo sapiens
ctgcattttgattctgaaaagaaagctggctttgcccatttcttattaaa

SEQ ID NO: 2646 - DNA, 50 bp, Homo sapiens
acctgtctgcataataaagctgatcatgttttgctacagtttgcaggtga

SEQ ID NO: 2647 - DNA, 50 bp, Homo sapiens
tactggtagatgtgctcattctccctgaaacatacccatcatattgtcct

SEQ ID NO: 2648 - DNA, 50 bp, Homo sapiens
aggaagcaatgtggttggacctggttaagggaaaggctgattacggaaat

SEQ ID NO: 2649 - DNA, 50 bp, Homo sapiens
aactaatactttgctgttgaaatgttgtgaaatgttaagtgtctggaaat

SEQ ID NO: 2650 - DNA, 50 bp, Homo sapiens
gagctttgtcacttgccacatggtgtcttccaacatgggagggatcagcc

SEQ ID NO: 2651 - DNA, 50 bp, Homo sapiens
ccctgttcactctacttagcatgtccctaccgagtctcttctccactgga

SEQ ID NO: 2652 - DNA, 50 bp, Homo sapiens
tgcacattgtttttcttctgacttccagaaataaaagtgtttccatggga

SEQ ID NO: 2653 - DNA, 50 bp, Homo sapiens
actaaaaaaggagaaattataataaattagccgtcttgcgcccctaggcc

SEQ ID NO: 2654 - DNA, 50 bp, Homo sapiens
acgacaaacctccttgtcaaagtgtgtaaaaataaaggattgctccatcc

SEQ ID NO: 2655 - DNA, 50 bp, Homo sapiens
ccactggggaagggaagtttcagtaacatgacactaaaatggcagagacg

SEQ ID NO: 2656 - DNA, 50 bp, Homo sapiens
aaagattggagctgaagacctaaagtgcttgctttttgcccgttgaccag

SEQ ID NO: 2657 - DNA, 50 bp, Homo sapiens
gaagtcagtgggaaacacacagaaatttattttaaaatctttcaggagct

SEQ ID NO: 2658 - DNA, 50 bp, Homo sapiens
agatgtattagaagtcctgactttcaagtgtaatttgctttggaggagga

SEQ ID NO: 2659 - DNA, 50 bp, Homo sapiens
ctgtgcagaagagctgccaggcagtgtcttagatgtgagacggaggccat

SEQ ID NO: 2660 - DNA, 50 bp, Homo sapiens
acatcatggagggtttagtgcttatctaatttgtgcctcactggacttgt

SEQ ID NO: 2661 - DNA, 50 bp, Homo sapiens
ttgcttaccaaaggaggcccaatttcactcaaatgttttgagaactgtgt

SEQ ID NO: 2662 - DNA, 50 bp, Homo sapiens
tcactcctctgtcctatgaagaccgctgccattggtgttgagaataataa

SEQ ID NO: 2663 - DNA, 50 bp, Homo sapiens
gttaagccaggacatccagaattcattgctttaataaagaacccaggccg

SEQ ID NO: 2664 - DNA, 50 bp, Homo sapiens
tcagttttaacaaatgctattaaagtggagaagcacactctggtcttgga

SEQ ID NO: 2665 - DNA, 50 bp, Homo sapiens
ctcactgcctctttgcagtaggggagagagcagagaagtacaggtcatct

SEQ ID NO: 2666 - DNA, 50 bp, Homo sapiens
ttgactttgctcgaggcaccttttttcctgtttctccttttctgttgtcg

SEQ ID NO: 2667 - DNA, 50 bp, Homo sapiens
aaatgggtttcactgtgaatgcgtgacaataagatattcccttgttccta

SEQ ID NO: 2668 - DNA, 50 bp, Homo sapiens
aacgaatttcctgaacctatcaaactggacaagaatgaccgggccaaggc

SEQ ID NO: 2669 - DNA, 50 bp, Homo sapiens
cttcccctggtcccctgtccctggggctgtttgttaaaaaagagtaataa

SEQ ID NO: 2670 - DNA, 50 bp, Homo sapiens
accgtgaaaattggtttcatttaacaaaagatcagatccctccttcagct

SEQ ID NO: 2671 - DNA, 50 bp, Homo sapiens
tttcttgttacacccactgcactctgcaaccagtgttgcctgcctcatgg

SEQ ID NO: 2672 - DNA, 50 bp, Homo sapiens
gggaaaaacaagaatttcatgactctacctgtggtctatctttaatttca

SEQ ID NO: 2673 - DNA, 50 bp, Homo sapiens
gctgtgcccttgaagagaatagtaatgatgggaatttagaggtttatgac

SEQ ID NO: 2674 - DNA, 50 bp, Homo sapiens
tccaaggaaatggtaacctgtttctgagaacacctgaaatcaatggctat

SEQ ID NO: 2675 - DNA, 50 bp, Homo sapiens
ttcattgtaatccactgttttggctttcatgaacaagtaaattacagtgt

SEQ ID NO: 2676 - DNA, 50 bp, Homo sapiens
acttatttccatgtttctgaatcttctttgtttcaaatggtgctgcatgt

SEQ ID NO: 2677 - DNA, 50 bp, Homo sapiens
atgcccggcctgggatgctgtttggagacggaataaatgttttctcattc

SEQ ID NO: 2678 - DNA, 50 bp, Homo sapiens
tactctaaacctgttatttctgtgctaataaacgagatgcagaacccttg

SEQ ID NO: 2679 - DNA, 50 bp, Homo sapiens
tgcagagagatactaagcagcaaaatcttggtgttgtgatgtacagaaat

SEQ ID NO: 2680 - DNA, 50 bp, Homo sapiens
agtctttgatcttgaaccgatacttttggatctcattgttgatatacctg

SEQ ID NO: 2681 - DNA, 50 bp, Homo sapiens
tggaatcaaataaaatgcttccactaccaaaagacattagagaaaacctt

SEQ ID NO: 2682 - DNA, 50 bp, Homo sapiens
tgccgaataccttaaagtaactaattatccttacacacaaaaggctcagt

SEQ ID NO: 2683 - DNA, 50 bp, Homo sapiens
ctttcccaggatcaaggccacagggaggaagattgcacgggcactgttct

SEQ ID NO: 2684 - DNA, 50 bp, Homo sapiens
cttgtaaactagcgccaaggaactgcagcaaataaactccaactctgccc

SEQ ID NO: 2685 - DNA, 50 bp, Homo sapiens; identical to SEQ ID NO: 1846

SEQ ID NO: 2686 - DNA, 50 bp, Homo sapiens
aggagggtttaaatagggttcagagatcataggaatattaggagttacct

SEQ ID NO: 2687 - DNA, 50 bp, Homo sapiens
tggtggaagtaaaaactggtaactcactcaagtgaatgaatggtcttgca

SEQ ID NO: 2688 - DNA, 50 bp, Homo sapiens
gcaggaaagggaaacagacgcgacagcaacaagagcaccagaagtatatg

SEQ ID NO: 2689 - DNA, 50 bp, Homo sapiens
tccattctgtttcggattttaagtttgagagacttgctaatgaatctcct

SEQ ID NO: 2690 - DNA, 50 bp, Homo sapiens
ccttcagaaacaccgtaattctaaataaacctcttcccatacacctttcc

SEQ ID NO: 2691 - DNA, 50 bp, Homo sapiens
ctggacaactttgagtactgacatcattgataaataaactggcttgtggt

SEQ ID NO: 2692 - DNA, 50 bp, Homo sapiens
cccaggggattttttaagtagatggggggacacggtgaactggctgtgtc

SEQ ID NO: 2693 - DNA, 50 bp, Homo sapiens
actccaaaataaatcaaggctgcaatgcagctggtgctgttcagattcca

SEQ ID NO: 2694 - DNA, 50 bp, Homo sapiens
tgaaatcttaagtgtcttatatgtaatcctgtaggttggtacttccccca

SEQ ID NO: 2695 - DNA, 50 bp, Homo sapiens
tgggagtcttctcttttagacaggggctttttgtttttaaccccaattgt

SEQ ID NO: 2696 - DNA, 50 bp, Homo sapiens
tgacccagatatggaaacagaagacaaaattgtaagccagagtcaacaaa

SEQ ID NO: 2697 - DNA, 50 bp, Homo sapiens
aggtttcatcaggtggttaaagtcgtcaaagttgtaagtgactaaccaag

SEQ ID NO: 2698 - DNA, 50 bp, Homo sapiens
atgctgtcaaagttacagtttacgcaggacattcttgccgtattctcatg

SEQ ID NO: 2699 - DNA, 50 bp, Homo sapiens
tgtgtgtttactaacccttccctgaggcttgtgtatgttggatattgtgg

SEQ ID NO: 2700 - DNA, 50 bp, Homo sapiens
tctgtaatcaaatgattggtgtcattttcccatttgccaatgtagtctca

SEQ ID NO: 2701 - DNA, 50 bp, Homo sapiens
tgcccagcagccatcttaatacattaaaccagtttaaaaaataccttcca

SEQ ID NO: 2702 - DNA, 50 bp, Homo sapiens
gccagagttgccaacccccggctggataccttcagcagagaaatcttccg

SEQ ID NO: 2703 - DNA, 50 bp, Homo sapiens
aatccattaacacctgctcacatcttactcaaaattgtagagttcatagt

SEQ ID NO: 2704 - DNA, 50 bp, Homo sapiens
atttgcaatttggaatttgtgtgagttgatttagtaaaatgttaaaccgc

SEQ ID NO: 2705 - DNA, 50 bp, Homo sapiens
aagtaaagcctcaggaatgcccacgcctttcttccaaagcctttgtctct

SEQ ID NO: 2706 - DNA, 50 bp, Homo sapiens
tcaaacaaatgactttcatattgcaacaatctttgtaagaaccactcaaa

SEQ ID NO: 2707 - DNA, 50 bp, Homo sapiens
ggggaatgtgttccttcattgtatttgggccttttgtattgcactcttga

SEQ ID NO: 2708 - DNA, 50 bp, Homo sapiens
ttgtttacctttcgtgcggtggattctttttaactccgtctacctggcgt

SEQ ID NO: 2709 - DNA, 50 bp, Homo sapiens
ggggtttgtgctatacactgggatgtctaattgcagcaataaagcctttc

SEQ ID NO: 2710 - DNA, 50 bp, Homo sapiens; identical to SEQ ID NO: 1614

SEQ ID NO: 2711 - DNA, 50 bp, Homo sapiens
agcctgcttctgccacacctcgctctcagtctctccacatttccatagag

SEQ ID NO: 2712 - DNA, 50 bp, Homo sapiens
aagtttctcagctcccatttctactctcccatggcttcatgcttctttca

SEQ ID NO: 2713 - DNA, 50 bp, Homo sapiens
gagctactgtgctcatctaaagtgtttgccccacttcccaccccgtctcc

SEQ ID NO: 2714 - DNA, 50 bp, Homo sapiens
atgttaagatttgtgtacaaattgaaatgtctgtactgatcctcaaccaa

SEQ ID NO: 2715 - DNA, 50 bp, Homo sapiens
tctgttgatagctggagaactttagtttcaagtactacattgtgaaagca

SEQ ID NO: 2716 - DNA, 50 bp, Homo sapiens
tgaggggtttcagaattttgcattgcagtcatagaagagatttatttcct

SEQ ID NO: 2717 - DNA, 50 bp, Homo sapiens
ccttgggagggagacttcatgtggtttattgcgagttttttgtttacttt

SEQ ID NO: 2718 - DNA, 50 bp, Homo sapiens
gtatgttaatgccagtcaccagcaggctatttcaaggtcagaagtaatga

SEQ ID NO: 2719 - DNA, 50 bp, Homo sapiens
gcccctaaaggcaagaagaaaaagtaaaagaccttggctcatagaaagtc

SEQ ID NO: 2720 - DNA, 50 bp, Homo sapiens
agtgaaatatgttacagaacatgcacttgccctaataaaaaatcagtgaa

SEQ ID NO: 2721 - DNA, 50 bp, Homo sapiens
tgcagatgctcttaaaagcattgataacctttgtgacgaacataaagaga

SEQ ID NO: 2722 - DNA, 50 bp, Homo sapiens
gctagttcatgtgttctccattcttgtgagcatcctaataaatctgttcc

SEQ ID NO: 2723 - DNA, 50 bp, Homo sapiens
aaccctcccaatatccctagcagcagcagcaaaccaaagtcaaagtatcc

SEQ ID NO: 2724 - DNA, 50 bp, Homo sapiens
cacctccccctacccatatccctcccgtgtgtggttggaaaacttttgtt

SEQ ID NO: 2725 - DNA, 50 bp, Homo sapiens
gagtcctgagccactgccaacatttcccttcttccagttgcactattctg

SEQ ID NO: 2726 - DNA, 50 bp, Homo sapiens
ccccaccccagaacagaaccgtgtctctgataaaggttttgaagtgaata

SEQ ID NO: 2727 - DNA, 50 bp, Homo sapiens
cccatttcttgtttttaaaagaccaacaaatctcaagccctataaatggc

SEQ ID NO: 2728 - DNA, 50 bp, Homo sapiens
agtgtagcttctgaaaggtgctttctccatttatttaaaactacccatgc

SEQ ID NO: 2729 - DNA, 50 bp, Homo sapiens
gagtgcccgattcctcttagagaaaatccatagccttcagatcttggtgt

SEQ ID NO: 2730 - DNA, 50 bp, Homo sapiens
actttgacacctactgtgttataaaatatatcatcagatgtgccttgaga

SEQ ID NO: 2731 - DNA, 50 bp, Homo sapiens; identical to SEQ ID NO: 1697

SEQ ID NO: 2732 - DNA, 50 bp, Homo sapiens
tgatattcaactctgagcatcaggttctaaaaaataatacatactggggt

SEQ ID NO: 2733 - DNA, 50 bp, Homo sapiens
gtcatctccccatttggtcccctggactgtctttgttgattctaacttgt

SEQ ID NO: 2734 - DNA, 50 bp, Homo sapiens
gagaataatgatgtaccaataagtggagattcctccttatgatgtatgct

SEQ ID NO: 2735 - DNA, 50 bp, Homo sapiens
acaagacagactccactcaaaatttatatgaacaccactagatacttcct

SEQ ID NO: 2736 - DNA, 50 bp, Homo sapiens
tccataccattgtgtgtggaggatttacagctaagctgtagttgcagagt

SEQ ID NO: 2737 - DNA, 50 bp, Homo sapiens
acacttttgattgttttctagatgtctaccaataaatgcaatttgtgacc

SEQ ID NO: 2738 - DNA, 50 bp, Homo sapiens
actgtacaatttctgaagatggttattaacactgtgctgttaagcatcca

SEQ ID NO: 2739 - DNA, 50 bp, Homo sapiens
tcagtcctttcttagggaaatgacagggcaaagcaatttttctgttggct

SEQ ID NO: 2740 - DNA, 50 bp, Homo sapiens
agtacaaggcccgaagggtagtgatggtgctaaactcaacatggatttgg

SEQ ID NO: 2741 - DNA, 50 bp, Homo sapiens
ccccagtctgcaaaagaagcacaattctattgctttgtcttgcttatagt

SEQ ID NO: 2742 - DNA, 50 bp, Homo sapiens; identical to SEQ ID NO: 256

SEQ ID NO: 2743 - DNA, 50 bp, Homo sapiens; identical to SEQ ID NO: 1718

SEQ ID NO: 2744 - DNA, 50 bp, Homo sapiens
ccttctttcacaggcatcaggaattgtcaaatgatgattatgagttccct

SEQ ID NO: 2745 - DNA, 50 bp, Homo sapiens
catcttcagcatcgtcttcttgcacatgaaggagaaggagaagtccgact

SEQ ID NO: 2746 - DNA, 50 bp, Homo sapiens
gggaatgctgcaaatgccaaacagctttatgatttcattcacacctcttt

SEQ ID NO: 2747 - DNA, 50 bp, Homo sapiens
ttaaaaatggttgtttaagactttaacaatgggaaccccttgtgagcatg

SEQ ID NO: 2748 - DNA, 50 bp, Homo sapiens
gggagaagtttgcagagcacttcccacctctctgaatagtgtgtatgtgt

SEQ ID NO: 2749 - DNA, 50 bp, Homo sapiens
tggttgacccttgtatgtcacagctctgctctatttattattattttgca

SEQ ID NO: 2750 - DNA, 50 bp, Homo sapiens
tgggaaggaaggctctgtcttcaactctttgaccctccatgtgtaccata

SEQ ID NO: 2751 - DNA, 50 bp, Homo sapiens; identical to SEQ ID NO: 1777

SEQ ID NO: 2752 - DNA, 50 bp, Homo sapiens
ctccccgtgctaaggcccacaaaagccaggactctctgtgcgtgaccctc

SEQ ID NO: 2753 - DNA, 50 bp, Homo sapiens
aattcaagaagaaaaacccaagaagaagaagaaggcacaggaggatctct

SEQ ID NO: 2754 - DNA, 50 bp, Homo sapiens
tcccagagctgatgctattgtacttgcacattggagactgaaaggaaaga

SEQ ID NO: 2755 - DNA, 50 bp, Homo sapiens
ggggaagccgaaggttacaaaggcaaagaaggcagctccgaagaaaaagt

SEQ ID NO: 2756 - DNA, 50 bp, Homo sapiens
tccctgaagaaatatctgtgaaccttctttctgttcagtcctaaaattcg

SEQ ID NO: 2757 - DNA, 50 bp, Homo sapiens
cctctccgaccttcatcactattcttaggataatgctggcgggcagagat

SEQ ID NO: 2758 - DNA, 50 bp, Homo sapiens
actgccatcttacgactatttcttctttttaatacacttaactcaggcca

SEQ ID NO: 2759 - DNA, 50 bp, Homo sapiens
agggtgtttcgttccctttaaatgaatcaacactgccaccttctgtacga

SEQ ID NO: 2760 - DNA, 50 bp, Homo sapiens; identical to SEQ ID NO: 130

SEQ ID NO: 2761 - DNA, 50 bp, Homo sapiens
catttcctgagaccaccagagagaggggagaagcctgggattgacagaag

SEQ ID NO: 2762 - DNA, 50 bp, Homo sapiens; identical to SEQ ID NO: 2761

SEQ ID NO: 2763 - DNA, 50 bp, Homo sapiens
gctaagaagcctataagaggaatttcttttccttcattcatagggaaagg

SEQ ID NO: 2764 - DNA, 50 bp, Homo sapiens
actgacagagtgaactacagaaatagcttttcttcctaaaggggattgtt

SEQ ID NO: 2765 - DNA, 50 bp, Homo sapiens
cagacaatggatgtggggtagaagaagaaaactttgaaggcttaatctct

SEQ ID NO: 2766 - DNA, 50 bp, Homo sapiens
aaaagaagaggaaaagtttagccaagagaatcagagaaagatgctgcatt

SEQ ID NO: 2767 - DNA, 50 bp, Homo sapiens
agtgcacatatttcataaccaaattagcagcaccggtcttaatttgatgt

SEQ ID NO: 2768 - DNA, 50 bp, Homo sapiens
tagacctctttttcttaccagtctcctcccctactctgccccctaagctg

SEQ ID NO: 2769 - DNA, 50 bp, Homo sapiens
agcacagtaaaagtaaagactattctgtttctaggctgttgaatcaaagt

SEQ ID NO: 2770 - DNA, 50 bp, Homo sapiens
catgggcacagtggtgacccccttgattcccaccgtacaaccccctccac

SEQ ID NO: 2771 - DNA, 50 bp, Homo sapiens
cgttatccagtgtgaaaatcagtgagtcctccctggcatcctcgtgaaag

SEQ ID NO: 2772 - DNA, 50 bp, Homo sapiens
gctgaagagtatagtaaagacacctcaaaaggcatgggagggtattatgc

SEQ ID NO: 2773 - DNA, 50 bp, Homo sapiens
ttcagactggtttctgttttttggttattaaaatggtttcctattttgct

SEQ ID NO: 2774 - DNA, 50 bp, Homo sapiens
tttatgattaggtgacgagttgacattgagattgtccttttcccctgatc

SEQ ID NO: 2775 - DNA, 50 bp, Homo sapiens
ccccaaccaggtccgtatgcggtaccttttaaaggttcagtttaatttcc

SEQ ID NO: 2776 - DNA, 50 bp, Homo sapiens
tcctgcaaggctggactgtgatcttcaatcatcctgcccatctctggtac

SEQ ID NO: 2777 - DNA, 50 bp, Homo sapiens
ggtcacggctactcatggaagcaggaccagtaagggaccttcgattaaaa

SEQ ID NO: 2778 - DNA, 50 bp, Homo sapiens
ccttctaacctgaactgatgggtttctccagagggaattgcagagtactg

SEQ ID NO: 2779 - DNA, 50 bp, Homo sapiens
atgtgtaggaggaagagttcaggtggaaaaggagggagctactctcaggc

SEQ ID NO: 2780 - DNA, 50 bp, Homo sapiens
aacgattgtctgcccatgtcctgcctgaaataccatgattgtttatggaa

SEQ ID NO: 2781 - DNA, 50 bp, Homo sapiens
ttccttttaggtatattgcgctaagtgaaacttgtcaaataaatcctcct

SEQ ID NO: 2782 - DNA, 50 bp, Homo sapiens
gtcttgactttggcaaatgagccggagccccttgggcaggtcacacaacc

SEQ ID NO: 2783 - DNA, 50 bp, Homo sapiens
gatacagagttgtccttggaggatggagacaggtgcaaggccaagatgtg

SEQ ID NO: 2784 - DNA, 50 bp, Homo sapiens
tcccatgatggaagtctgcgtaaccaataaattgtgcctttctcactcaa

SEQ ID NO: 2785 - DNA, 50 bp, Homo sapiens
tctacatgtcttgggggcgggctcaaattcttcgaaagtggttggattaa

SEQ ID NO: 2786 - DNA, 50 bp, Homo sapiens
acctgttatcctttgtagagcacacagagttaaaagttgaatatagcaat

SEQ ID NO: 2787 - DNA, 50 bp, Homo sapiens
tgagcttctccagcagtgcgggtcctgggctcctgaaggcttattccatc

SEQ ID NO: 2788 - DNA, 50 bp, Homo sapiens
gcatgtcctcatcctttcctgccataaaagctatgacacgagaatcagaa

SEQ ID NO: 2789 - DNA, 50 bp, Homo sapiens
acccctccccatgaacacaagggttttatcctttcctttaaaaacagtgt

SEQ ID NO: 2790 - DNA, 50 bp, Homo sapiens
tgcaaccaactatccaagtgttataccaactaaaacccccaataaacctt

SEQ ID NO: 2791 - DNA, 50 bp, Homo sapiens
atgcccagacaaaaagctaataccagtcactcgataataaagtattcgca

SEQ ID NO: 2792 - DNA, 50 bp, Homo sapiens
tggcactgagaaacatgcaagatacaggaaaaatgaaaatgttacaagct

SEQ ID NO: 2793 - DNA, 50 bp, Homo sapiens
tctcaaaggagtaactgcagcttggtttgaaatttgtactgtttctatca

SEQ ID NO: 2794 - DNA, 50 bp, Homo sapiens
gtcaacctttgtgagaagccgtatccacttcacaggataaaattgtccat

SEQ ID NO: 2795 - DNA, 50 bp, Homo sapiens
atctccacagcccacccatcccctgagcacactaaccacctcatgcaggc

SEQ ID NO: 2796 - DNA, 50 bp, Homo sapiens
tttcctgactcctccttgcaaacaaaatgatagttgacactttatcctga

SEQ ID NO: 2797 - DNA, 50 bp, Homo sapiens
cctgcagtaacccataggaaataaactgtagagttccatattctgcggcc

SEQ ID NO: 2798 - DNA, 50 bp, Homo sapiens
tagaaagggtttttatggaccaatgccccagttgtcagtcagagccgttg

SEQ ID NO: 2799 - DNA, 50 bp, Homo sapiens
tgtgatgacgtgagatcaataagaagaacctagtctagagacaatgatgc

SEQ ID NO: 2800 - DNA, 50 bp, Homo sapiens
gtgcttgctgtctctcccggacacccttaaagactgtctttttagcaaaa

SEQ ID NO: 2801 - DNA, 50 bp, Homo sapiens
aacattgtttttgtatattgggtgtagatttctgacatcaaaacttggac

SEQ ID NO: 2802 - DNA, 50 bp, Homo sapiens
tgtgtaactggattccttgcatggatcttgtatatagttttatttgctga

SEQ ID NO: 2803 - DNA, 50 bp, Homo sapiens
caggacctccaagccactgagcaatgtataaccccaaagggaattcaaaa

SEQ ID NO: 2804 - DNA, 50 bp, Homo sapiens
gatctgacccaccagtttgtacatcacgtcctgcatgtcccacaccattt

SEQ ID NO: 2805 - DNA, 50 bp, Homo sapiens; identical to SEQ ID NO: 1639

SEQ ID NO: 2806 - DNA, 50 bp, Homo sapiens
tgcgtcttgtgaaattgtgtagagtgtttgtgagctttttgttccctcat

SEQ ID NO: 2807 - DNA, 50 bp, Homo sapiens
cttcggcctccctggccctgggttaaaataaaagctttctggtgatcctg

SEQ ID NO: 2808 - DNA, 50 bp, Homo sapiens
tgagcttgtgcttagtatttacattggatgccagttttgtaatcactgac

SEQ ID NO: 2809 - DNA, 50 bp, Homo sapiens
atttgaaattttctgcagcattaaagctggcgcttaataagaataagtaa

SEQ ID NO: 2810 - DNA, 50 bp, Homo sapiens
tcgcattctgtttcttgctttaaaagaagagtaaagacaagagtgttgga

SEQ ID NO: 2811 - DNA, 50 bp, Homo sapiens; identical to SEQ ID NO: 618

SEQ ID NO: 2812 - DNA, 50 bp, Homo sapiens
ctgtcagccaaggtgcctgaaacgatacgtgtgcccactccactgtcaca

SEQ ID NO: 2813 - DNA, 50 bp, Homo sapiens; identical to SEQ ID NO: 1278

SEQ ID NO: 2814 - DNA, 50 bp, Homo sapiens
tcgatcagtgctcagagattgtgaaatgcagtgttagctccctgggattc

SEQ ID NO: 2815 - DNA, 50 bp, Homo sapiens
aggacaaatcttgttgtattaacagcagggtcacttctcattttctttgc

SEQ ID NO: 2816 - DNA, 50 bp, Homo sapiens
agtcgtattctgtcacataatattttgaagaaaacttggctgtcgaaaca

SEQ ID NO: 2817 - DNA, 50 bp, Homo sapiens
aggagggtgggtggaacaggtggactggagtttctcttgagggcaataaa

SEQ ID NO: 2818 - DNA, 50 bp, Homo sapiens; identical to SEQ ID NO: 2817

SEQ ID NO: 2819 - DNA, 50 bp, Homo sapiens
tgcacctcaagattttaaggagataatgtttttagagagaatttctgctt

SEQ ID NO: 2820 - DNA, 50 bp, Homo sapiens
gcttatggtccccagcatttacagtaacttgtgaatgttaagtatcatct

SEQ ID NO: 2821 - DNA, 50 bp, Homo sapiens
cttgttttgtttgtctctccttttcttttgttactgttcttgctgctaga

SEQ ID NO: 2822 - DNA, 50 bp, Homo sapiens; identical to SEQ ID NO: 704

SEQ ID NO: 2823 - DNA, 50 bp, Homo sapiens
tcaagaataaaaatgcctctccagccttaagtatttacatgctcccaggt

SEQ ID NO: 2824 - DNA, 50 bp, Homo sapiens
tctggaaatgtgttataagctaggagaatccctttggacagtctttattt

SEQ ID NO: 2825 - DNA, 50 bp, Homo sapiens
atttcctatcaccatacttttccatgtgaaaacctgagcctatttctagt

SEQ ID NO: 2826 - DNA, 50 bp, Homo sapiens
tggctgttgctttgcttcatgtgtatggctatttgtatttaacaagactt

SEQ ID NO: 2827 - DNA, 50 bp, Homo sapiens
atagccatcctctttgcagtcctgttggttgtgctcatcctcttcctagt

SEQ ID NO: 2828 - DNA, 50 bp, Homo sapiens
agggccagggctggtgtccctaaggttgtacagactcttgtgaatatttg

SEQ ID NO: 2829 - DNA, 50 bp, Homo sapiens
gccgtgacaatttgttctttgatgtgattgtatttccaatttcttgttca

SEQ ID NO: 2830 - DNA, 50 bp, Homo sapiens
tggtatatacaactttcagagcctcttgtatttggaaggctggaagggcc

SEQ ID NO: 2831 - DNA, 50 bp, Homo sapiens
gctactgcagggtgaggaagaaggggaagaagattgatcaaacagaatga

SEQ ID NO: 2832 - DNA, 50 bp, Homo sapiens
tgtttcaagcccttctgtaaaatatgaagaaaagtctcttagcattctgt

SEQ ID NO: 2833 - DNA, 50 bp, Homo sapiens; identical to SEQ ID NO: 490

SEQ ID NO: 2834 - DNA, 50 bp, Homo sapiens
atctttgtgagcaattatgctcccaaatctaagcaagtaataaagaaggg

SEQ ID NO: 2835 - DNA, 50 bp, Homo sapiens
tgtaaagtttgtacaatttgtcctgaagctttgtgtttggctgcacctgc

SEQ ID NO: 2836 - DNA, 50 bp, Homo sapiens
acagtataactcctgaatgctacttaaataaaccaggattcaaactgcaa

SEQ ID NO: 2837 - DNA, 50 bp, Homo sapiens
agaagcagattttcctgtagaaaaactaatttttctgccttttaccaaaa

SEQ ID NO: 2838 - DNA, 50 bp, Homo sapiens
gagcttgctccagattctgatgcatacggctatattggtttatgtagtca

SEQ ID NO: 2839 - DNA, 50 bp, Homo sapiens
atgggtgttatcacctagctgaatgtttttctaaaggagtttatgttcca

SEQ ID NO: 2840 - DNA, 50 bp, Homo sapiens
acgtgcttcttggtacaggtttgtgaatgacagtttatcgtcatgctgtt

SEQ ID NO: 2841 - DNA, 50 bp, Homo sapiens
tgttgttgttggcaagctgcaggtttgtaatgcaaaaggctgattactga

SEQ ID NO: 2842 - DNA, 50 bp, Homo sapiens
tcattgttcgcttctgtaattctgaaaaactttaaactggtagaacttgg

SEQ ID NO: 2843 - DNA, 50 bp, Homo sapiens
ccagtgctgtttggtggtctgccttctttttaatggtattttcttcctca

SEQ ID NO: 2844 - DNA, 50 bp, Homo sapiens
gccccaccattcatcctgtctgaaggtcctgggtttggtgtgaccgcttg

SEQ ID NO: 2845 - DNA, 50 bp, Homo sapiens
ccgacaggtgggcctgggaggaaaatgtttacatttttaaaggcacactg

SEQ ID NO: 2846 - DNA, 50 bp, Homo sapiens
ggggtggacgcctctgccttcacttgaacacaaatgtgcttcctataaaa

SEQ ID NO: 2847 - DNA, 50 bp, Homo sapiens
ggcagcccccagtccctttctgtcccagctcagttttccaaaagacactg

SEQ ID NO: 2848 - DNA, 50 bp, Homo sapiens
ctgttaagcactgttatgctcagtcatacacgcgaaaggtacaatgtctt

SEQ ID NO: 2849 - DNA, 50 bp, Homo sapiens; identical to SEQ ID NO: 198

SEQ ID NO: 2850 - DNA, 50 bp, Homo sapiens
ttcagttttgctttcaattttatgtaccttagttctgagttagacctgca

SEQ ID NO: 2851 - DNA, 50 bp, Homo sapiens
aaggattatgaggaggttggtgtgcattctgttgaaggagagggtgagga

SEQ ID NO: 2852 - DNA, 50 bp, Homo sapiens
tcccttccttctgttgctggtgtactctaggacttcaaagtgtgtctggg

SEQ ID NO: 2853 - DNA, 50 bp, Homo sapiens
agttcattaaaaactgcaaaaccaatctgtatcatgtaccaaactgactt

SEQ ID NO: 2854 - DNA, 50 bp, Homo sapiens
tgcacgttcctcctggttccttcgcttgtgtttctgtacttaccaaaaat

SEQ ID NO: 2855 - DNA, 50 bp, Homo sapiens
tgccagacctccttcctgacctctgaggcaggagaggaataaagacggtc

SEQ ID NO: 2856 - DNA, 50 bp, Homo sapiens
agtcccaagggtgttttgttactgttttctccatgaataaactcacttga

SEQ ID NO: 2857 - DNA, 50 bp, Homo sapiens
attaatgtcatttctggaagtgtgaaaatgttaatgttcaacaagcaaca

SEQ ID NO: 2858 - DNA, 50 bp, Homo sapiens
gcgggtgggccgagcagtgtggacatcagccactttttatattcatgtac

SEQ ID NO: 2859 - DNA, 50 bp, Homo sapiens
ccactgagaactaaatgctgtaccacagagccgggtgtgaactatggttt

SEQ ID NO: 2860 - DNA, 50 bp, Homo sapiens
aaacaatcgctccgggctcagggctgcgcggctcttcccttcattccatg

SEQ ID NO: 2861 - DNA, 50 bp, Homo sapiens
tgtcctctgttcaattcctaacgcaaactacaataaatggtgacacacgt

SEQ ID NO: 2862 - DNA, 50 bp, Homo sapiens
agcacctaaggagcttgaatcttggttcctgtaaaatttcaaattgatgt

SEQ ID NO: 2863 - DNA, 50 bp, Homo sapiens
accaacactgtcccaaggtgaaatgaagcaacagagaggaaattgtacat

SEQ ID NO: 2864 - DNA, 50 bp, Homo sapiens
tgtcagccatttcaatgtcttgggaaacaattttttgtttttgttctgtt

SEQ ID NO: 2865 - DNA, 50 bp, Homo sapiens
agagcttgatcgccagtggaagaagattagtgcaatcattgagaagagga

SEQ ID NO: 2866 - DNA, 50 bp, Homo sapiens
tttccctcttccctgacctcccaactctaaagccaagcactttatatttt

SEQ ID NO: 2867 - DNA, 50 bp, Homo sapiens
ggcaggtgaccattggcacacgctagaagtttatggcagagctttacaaa

SEQ ID NO: 2868 - DNA, 50 bp, Homo sapiens
ctgtttgtagataggttttttatctctcagtacacattgccaaatggagt

SEQ ID NO: 2869 - DNA, 50 bp, Homo sapiens; identical to SEQ ID NO: 84

SEQ ID NO: 2870 - DNA, 50 bp, Homo sapiens
tagactcattgtaagttgccactgccaacatgagaccaaagtgtgtgact

SEQ ID NO: 2871 - DNA, 50 bp, Homo sapiens
caaacctttctggcctgttatgattctgaacatttgacttgaaccacaag

SEQ ID NO: 2872 - DNA, 50 bp, Homo sapiens
gggaaagtatagcatgaaaccagaggttctcagaatgaccgtaagatagc

SEQ ID NO: 2873 - DNA, 50 bp, Homo sapiens; identical to SEQ ID NO: 1594

SEQ ID NO: 2874 - DNA, 50 bp, Homo sapiens; identical to SEQ ID NO: 1643

SEQ ID NO: 2875 - DNA, 50 bp, Homo sapiens
cttctggcacccctggggttcaatactggaagtgccttatttaaccagac

SEQ ID NO: 2876 - DNA, 50 bp, Homo sapiens
ggtctttagcctccaccttgtctaagctttggtctataaagtgcgctaca

SEQ ID NO: 2877 - DNA, 50 bp, Homo sapiens
tgatgatatgacatctggctaaaaagaaattattgcaaaactaaccacga

SEQ ID NO: 2878 - DNA, 50 bp, Homo sapiens
tccaaagcagtctccactgttgttgtgactacagctccgtctcctaaaca

SEQ ID NO: 2879 - DNA, 50 bp, Homo sapiens
attgtcaccaggttggaactcttgcctctgtgaggatgccttctctactg

SEQ ID NO: 2880 - DNA, 50 bp, Homo sapiens
ttttctttgtatatttctagtatggcacatgatatgagtcactgcctttt

SEQ ID NO: 2881 - DNA, 50 bp, Homo sapiens
tgaccttcatgataccagtgagaagccaggctagagaaataaaatcctga

SEQ ID NO: 2882 - DNA, 50 bp, Homo sapiens
acggattggttaaaaaatgcttcatatttgaaaaagctgggaattgctgt

SEQ ID NO: 2883 - DNA, 50 bp, Homo sapiens
gtctctctccattgtgttccgatccatttctgtgtgttcccccaaccttt

SEQ ID NO: 2884 - DNA, 50 bp, Homo sapiens
gccactgccataacttgtttgtaaaagagctgttctttttgactgattgt

SEQ ID NO: 2885 - DNA, 50 bp, Homo sapiens
gaacattgcccagcactacggcatgtcgtacctcctggagaccctggagt

SEQ ID NO: 2886 - DNA, 50 bp, Homo sapiens
atcttcattgggggattgagcagcatttaataaagtctatgtttgtattt

SEQ ID NO: 2887 - DNA, 50 bp, Homo sapiens
ttataaccgagggctggcgttttggaatcgaatttcgacagggattggaa

SEQ ID NO: 2888 - DNA, 50 bp, Homo sapiens; identical to SEQ ID NO: 1820

SEQ ID NO: 2889 - DNA, 50 bp, Homo sapiens; identical to SEQ ID NO: 206

SEQ ID NO: 2890 - DNA, 50 bp, Homo sapiens
aaccaaggagttttccccgtttgtaaaaagacattgtagataattgaatg

SEQ ID NO: 2891 - DNA, 50 bp, Homo sapiens
accatgttctttcgttaaagatttgctttatacaagattgttgcagtacc

SEQ ID NO: 2892 - DNA, 50 bp, Homo sapiens
cacatctgcttccactgtgttcccacgggtgccatgaagtgtgtgaggag

SEQ ID NO: 2893 - DNA, 50 bp, Homo sapiens
cgcactacttcacctgagccacccaacctaaatgtacttatctgtcccca

SEQ ID NO: 2894 - DNA, 50 bp, Homo sapiens; identical to SEQ ID NO: 2193

SEQ ID NO: 2895 - DNA, 50 bp, Homo sapiens
ctctccaagagtattattaacgctgctgtacctcgatctgaatctgccgg

SEQ ID NO: 2896 - DNA, 50 bp, Homo sapiens
tccctaatagaaagccacctattctttgttggatttcttcaagtttttct

SEQ ID NO: 2897 - DNA, 50 bp, Homo sapiens
agtactgcttttgtatgtatgttgaacaggatccaggtttttatagcttg

SEQ ID NO: 2898 - DNA, 50 bp, Homo sapiens
cactttctatcctctgtaaactttttgtgctgaatgttgggactgctaaa

SEQ ID NO: 2899 - DNA, 50 bp, Homo sapiens
gaagaatgggcaaagaagtaatcatgtagttgaagtctgtggatgcagct

SEQ ID NO: 2900 - DNA, 50 bp, Homo sapiens
caaaggttcttgagactcttgatatttctgtcttctccttgtgctttcct

SEQ ID NO: 2901 - DNA, 50 bp, Homo sapiens
ccgatggatctacagttgcaatgagaagcagaagttacttcctcaccagc

SEQ ID NO: 2902 - DNA, 50 bp, Homo sapiens
ttcctgcataactcaatctgaaccaaggattgtagtttagttttcctcct

SEQ ID NO: 2903 - DNA, 50 bp, Homo sapiens
gcagggtggtggtattctgtcatttacacacgtcgttctaattaaaaagc

SEQ ID NO: 2904 - DNA, 50 bp, Homo sapiens
gcactttttgtttgaatgttagatgcttagtgtgaagttgatacgcaagc

SEQ ID NO: 2905 - DNA, 50 bp, Homo sapiens
gcaagaaatattccattgaaatattgtgctgtaacatgggaaagtgtaaa

SEQ ID NO: 2906 - DNA, 50 bp, Homo sapiens
gccaacactgtctgtctcaaatactgtgctgtgagttgtttcaataaagg

SEQ ID NO: 2907 - DNA, 50 bp, Homo sapiens
gacctcatctccaagatggagaagatctgacctccacggagccgctgtcc

SEQ ID NO: 2908 - DNA, 50 bp, Homo sapiens
ctttactaaaaaagaagcacctgagtggtctaagaaacaaaagatgaaga

SEQ ID NO: 2909 - DNA, 50 bp, Homo sapiens
gcctggaagactctgaaggagcgtgagagcatcctgaagctgctggatgg

SEQ ID NO: 2910 - DNA, 50 bp, Homo sapiens
caggaggaagctctggcccttgtattacacattctggacattaaaaataa

SEQ ID NO: 2911 - DNA, 50 bp, Homo sapiens
gccttttgagtctttccgatacctgagtttttatgcttataatttttgtt

SEQ ID NO: 2912 - DNA, 50 bp, Homo sapiens
ttaagctgaggatacaaccaggaaatgcaacggtgtcagattgtgttcaa

SEQ ID NO: 2913 - DNA, 50 bp, Homo sapiens; identical to SEQ ID NO: 1714

SEQ ID NO: 2914 - DNA, 50 bp, Homo sapiens
agcaataaactctggatgtttgtgcgcgtgtgtggacagtcttatcttcc

SEQ ID NO: 2915 - DNA, 50 bp, Homo sapiens
agctgttgatgctggttggacaggtttgagtcaaattgtactttgctcca

SEQ ID NO: 2916 - DNA, 50 bp, Homo sapiens
aggtgacatttcccaccctgtgcccgtgttcccaataaaaacaaattcac

SEQ ID NO: 2917 - DNA, 50 bp, Homo sapiens
ctgtggctgactgtaatactgtacaactgtttctgaccattaaatgctgt

SEQ ID NO: 2918 - DNA, 50 bp, Homo sapiens
acatatgcagacctgacactcaagagtggctagctacacagagtccatct

SEQ ID NO: 2919 - DNA, 50 bp, Homo sapiens
tgacttcacagacatggtctagaatctgtacccttacccacatatgaaga

SEQ ID NO: 2920 - DNA, 50 bp, Homo sapiens
cccagtctctgtcagcactcccttcttcccttttatagttcatcagccac

SEQ ID NO: 2921 - DNA, 50 bp, Homo sapiens
tgactgagtacccctttagtgagtacccctttagtgctatatttgtgcca

SEQ ID NO: 2922 - DNA, 50 bp, Homo sapiens
tgccttttgagcaaatagggaatctaagggaggaaattatcaactgtgca

SEQ ID NO: 2923 - DNA, 50 bp, Homo sapiens
gcggggccggggggactctggtatctaattctttaatgattcctataaat

SEQ ID NO: 2924 - DNA, 50 bp, Homo sapiens
acaactttctgtacaatattgattcccatctggcatattctaatcaggtt

SEQ ID NO: 2925 - DNA, 50 bp, Homo sapiens; identical to SEQ ID NO: 633

SEQ ID NO: 2926 - DNA, 50 bp, Homo sapiens
aacaacattaacttgtggcctctttctacacctggaaatttactcttgaa

SEQ ID NO: 2927 - DNA, 50 bp, Homo sapiens
acagccgagtcctgcatcagccctttatcctcacacgcttttctacaatg

SEQ ID NO: 2928 - DNA, 50 bp, Homo sapiens
gtcaaggctaagtcaaatgaaactgaattttaaactttttgcatgcttct

SEQ ID NO: 2929 - DNA, 50 bp, Homo sapiens
aaacgacatgaaggtagatgaagtcctttacgaagactcgtcaacagctt

SEQ ID NO: 2930 - DNA, 50 bp, Homo sapiens
cccaataccaagaccaactggcatagagccaactgagataaatgctattt

SEQ ID NO: 2931 - DNA, 50 bp, Homo sapiens
gggtctatacagagtcaatatattttttcagagaaagttagttcggctcg

SEQ ID NO: 2932 - DNA, 50 bp, Homo sapiens
ccagaaagtgtgggctgaagatggttggtttcatgtgggggtattatgta

SEQ ID NO: 2933 - DNA, 50 bp, Homo sapiens
tccaaccttgagatccagtgtcaggagttctctattcctcccaactctga

SEQ ID NO: 2934 - DNA, 50 bp, Homo sapiens
tggcacagaaaagggaccaagtttaaaaaagggttttaaatgtaatgaga

SEQ ID NO: 2935 - DNA, 50 bp, Homo sapiens
ggggtaggttggttgttcagagtcttcccaataaagatgagtttttgagc

SEQ ID NO: 2936 - DNA, 50 bp, Homo sapiens
tgggcatagggacccatcattgatgactgatgaaaccatgtaataaagca

SEQ ID NO: 2937 - DNA, 50 bp, Homo sapiens
attttcctacagccctttgtacttcaaaatatgtttttgtgtccatcagt

SEQ ID NO: 2938 - DNA, 50 bp, Homo sapiens
tcagcactaactaaataaatttgttggttcagttgtacttgtcctgcaaa

SEQ ID NO: 2939 - DNA, 50 bp, Homo sapiens
agagggtggatcacacctcagtgggaagaaaaataaaatttccttcaggt

SEQ ID NO: 2940 - DNA, 50 bp, Homo sapiens
tgtgtaagtctgcctaaataggtagcttaaacttatgtcaaaatgtctgc

SEQ ID NO: 2941 - DNA, 50 bp, Homo sapiens
tcctttctgcttagtgaatgaatactggaatccatctgtgttgatacaat

SEQ ID NO: 2942 - DNA, 50 bp, Homo sapiens
gcaataccaagagaaaatgcacaaatatcactggatggagatgtcacatt

SEQ ID NO: 2943 - DNA, 50 bp, Homo sapiens
tggggatctcagggccaggagttatgttttgatttggaattttaattatt

SEQ ID NO: 2944 - DNA, 50 bp, Homo sapiens
ccagtaacttcgctctgttagaggtggaggattttcctatgttcccccca

SEQ ID NO: 2945 - DNA, 50 bp, Homo sapiens
tgctgaaaagattgtactttgtgatcccaatcagagggatggagctaatc

SEQ ID NO: 2946 - DNA, 50 bp, Homo sapiens
tcagactgctgagaaggaagaatttgaacatcaacagaaagagctggaga

SEQ ID NO: 2947 - DNA, 50 bp, Homo sapiens
tgggcagcttgggtaagtacgcaacttacttttccaccaaagaactgtca

SEQ ID NO: 2948 - DNA, 50 bp, Homo sapiens; identical to SEQ ID NO: 1651

SEQ ID NO: 2949 - DNA, 50 bp, Homo sapiens; identical to SEQ ID NO: 1702

SEQ ID NO: 2950 - DNA, 50 bp, Homo sapiens; identical to SEQ ID NO: 629

SEQ ID NO: 2951 - DNA, 50 bp, Homo sapiens
atgggccaggcagagaacagaactggaggcagtccatctagggaatggga

SEQ ID NO: 2952 - DNA, 50 bp, Homo sapiens
gtttcctttttgggtgaaatggatttatgtgagtgctttaaacaaatagc

SEQ ID NO: 2953 - DNA, 50 bp, Homo sapiens
gaacaatggagccagctgaaggaacagatttctgacatagatgacgcagt

SEQ ID NO: 2954 - DNA, 50 bp, Homo sapiens; identical to SEQ ID NO: 1747

SEQ ID NO: 2955 - DNA, 50 bp, Homo sapiens; identical to SEQ ID NO: 1664

SEQ ID NO: 2956 - DNA, 50 bp, Homo sapiens
agcacagatggtgcaatactttccttctttgaagagatcccaaagttagt

SEQ ID NO: 2957 - DNA, 50 bp, Homo sapiens
tggaagaatgtacagcttatggacaaatgtacacctttttgttactttaa

SEQ ID NO: 2958 - DNA, 50 bp, Homo sapiens
ttttggagcaaaaactatgggttgtaatttgaataaagtgtcactaagca

SEQ ID NO: 2959 - DNA, 50 bp, Homo sapiens
ttcagcaggaaaatgattcaatttttaaacaaaatgtaacagatggcagt

SEQ ID NO: 2960 - DNA, 50 bp, Homo sapiens
aagtagccaagctaagatgcctggctgggcttctgaggaattaatacact

SEQ ID NO: 2961 - DNA, 50 bp, Homo sapiens
ctgaccgccactctcacatttgggctcttcgctggccttggtggagctgg

SEQ ID NO: 2962 - DNA, 50 bp, Homo sapiens
tgcattgtgtagctagttttctggaaaagtcaatcttttaggaattgttt

SEQ ID NO: 2963 - DNA, 50 bp, Homo sapiens
acagctatactttgttgtgtaatgttatggttccctttctgtaaaatgtt

SEQ ID NO: 2964 - DNA, 50 bp, Homo sapiens
gacaggatcccccagagaccccatttgcctctcaacactcagaccttcaa

SEQ ID NO: 2965 - DNA, 50 bp, Homo sapiens
tttggtttaaaatgtaagataggaaaatgttggatatttgaggccatgct

SEQ ID NO: 2966 - DNA, 50 bp, Homo sapiens
aatctacattttcttaccaggagcagcattgaggtttttgagcatagtac

SEQ ID NO: 2967 - DNA, 50 bp, Homo sapiens
actaacccacgattctgagccctgagtatgcctggacattgatgctaaca

SEQ ID NO: 2968 - DNA, 50 bp, Homo sapiens
ttattctgcgtccccttctccaataaaacaagccagttgggcgtggttat

SEQ ID NO: 2969 - DNA, 50 bp, Homo sapiens
tccttcccactctctccaacatcacattcactttaaatttttctgtatat

SEQ ID NO: 2970 - DNA, 50 bp, Homo sapiens
agtcccaaaaaagccttgtgaaaatgttatgccctatgtaacagcagagt

SEQ ID NO: 2971 - DNA, 50 bp, Homo sapiens
aggggagggcactacacttccttgagagaaaccgctgtcattaataaaag

SEQ ID NO: 2972 - DNA, 50 bp, Homo sapiens
aggctgtagaaggaaatataccttaacaggctgatttggagtgacccaga

SEQ ID NO: 2973 - DNA, 50 bp, Homo sapiens
accagttacccaaaatctgattagaagtataaggtgctctgaagtgtcct

SEQ ID NO: 2974 - DNA, 50 bp, Homo sapiens
tgaggcttgtgaggccaatcaaaataatgtttgtgatctctactactgtt

SEQ ID NO: 2975 - DNA, 50 bp, Homo sapiens
cagttcccaaggacttgtcatttcatgttcttattttagacctgttttgt

SEQ ID NO: 2976 - DNA, 50 bp, Homo sapiens
accactagaagattccgggaacgttgggagtcacctgattctgcaaagat

SEQ ID NO: 2977 - DNA, 50 bp, Homo sapiens
gtcaagctgaccttgctgatggtgacattgcacctggatgtactatccaa

SEQ ID NO: 2978 - DNA, 50 bp, Homo sapiens
acagctcaagtaccctaatttagttcttttggactaatacaattcaggaa

SEQ ID NO: 2979 - DNA, 50 bp, Homo sapiens
gatgacgctgggcacagagggtcaggtcctgtcaagaggagctgggtgtc

SEQ ID NO: 2980 - DNA, 50 bp, Homo sapiens
aacatctctcttctccttcccaactactgcatgaagaaattctacttcca

SEQ ID NO: 2981 - DNA, 50 bp, Homo sapiens
ttcctgcctggattatttaaaaagccatgtgtggaaacccactatttaat

SEQ ID NO: 2982 - DNA, 50 bp, Homo sapiens
tgctacatttccaaggtgaagatgtgtgggcacatgttatggcagattga

SEQ ID NO: 2983 - DNA, 50 bp, Homo sapiens
acaaccatcaacattgctgttcaaagaaattacagtttacgtccattcca

SEQ ID NO: 2984 - DNA, 50 bp, Homo sapiens
cccacccataggccctgtccatacccatgtaaggtgttcaataaagaaca

SEQ ID NO: 2985 - DNA, 50 bp, Homo sapiens
actcttcaggagcttggcatcatggactgttaatgtatgtgattttcccc

SEQ ID NO: 2986 - DNA, 50 bp, Homo sapiens
ggtcaagggtgtcctccactctttaacagctgctggacagacacattaga

SEQ ID NO: 2987 - DNA, 50 bp, Homo sapiens
gcaacttcatgtcaactttctggctcctcaaacagtaggttggcagtaag

SEQ ID NO: 2988 - DNA, 50 bp, Homo sapiens
ccaagtggagacggggatggggaaaaatactgattctgtggaaaataccc

SEQ ID NO: 2989 - DNA, 50 bp, Homo sapiens; identical to SEQ ID NO: 1684

SEQ ID NO: 2990 - DNA, 50 bp, Homo sapiens
gcaggggctccagcaacaaaaaagaaacagcaacagaaaaagaagaaagg

SEQ ID NO: 2991 - DNA, 50 bp, Homo sapiens
agactcacttaccctcttggaaagctggtacagaaggaagtctgtggctg

SEQ ID NO: 2992 - DNA, 50 bp, Homo sapiens
cctggtcattggtggatgttaaacccatattcctttcaactgctgcctgc

SEQ ID NO: 2993 - DNA, 50 bp, Homo sapiens
aatgaattggcctggctaccactgtggtcgcgtgctacaggtttgacaaa

SEQ ID NO: 2994 - DNA, 50 bp, Homo sapiens
ttgatttgccataagtcttcccttgcttgcatcttccaaagctatttcga

SEQ ID NO: 2995 - DNA, 50 bp, Homo sapiens
agtgaagttacagtggaaatgagtggagggggattgtctttcaacgcagc

SEQ ID NO: 2996 - DNA, 50 bp, Homo sapiens
gcttggtcattatgaaccaggtgagcaatgcctacctataccgcaagagg

SEQ ID NO: 2997 - DNA, 50 bp, Homo sapiens
aaggcactgaaaatataaaaggactggtagtttactgatgtagatgtgaa

SEQ ID NO: 2998 - DNA, 50 bp, Homo sapiens
gcagaaaaggggaactcatttagctcacgagtggtcgagtgaagattgaa

SEQ ID NO: 2999 - DNA, 50 bp, Homo sapiens
tatcttgagacgccttacaaatgatggaggattccaaagagtttttgttt

SEQ ID NO: 3000 - DNA, 50 bp, Homo sapiens
aaaatgttgttgtgtacataccatgctttcaatgttggcttccaagtttt

SEQ ID NO: 3001 - DNA, 50 bp, Homo sapiens
ggtagaatgtgctcttctatatctactcctcaataaagcatgttctctgc

SEQ ID NO: 3002 - DNA, 50 bp, Homo sapiens
ccacaagaggatttaagggaggaatgtttataggacacacacacaaaagc

SEQ ID NO: 3003 - DNA, 50 bp, Homo sapiens
ctccagcagggtcagccattcacacccatccactcacctcccattcccag

SEQ ID NO: 3004 - DNA, 50 bp, Homo sapiens
aaactggcagaatgtccgggccttatatatcaagagcaccatgggcaagc

SEQ ID NO: 3005 - DNA, 50 bp, Homo sapiens; identical to SEQ ID NO: 1797

SEQ ID NO: 3006 - DNA, 50 bp, Homo sapiens
tgggagtgaggatgggaatgctgtatctgtggaagtcatgttatactgga

SEQ ID NO: 3007 - DNA, 50 bp, Homo sapiens
tgcttagatcactgcagcttctaggacccggtttcttttactgatttaaa

SEQ ID NO: 3008 - DNA, 50 bp, Homo sapiens
ctgaactaccaaatagctgtgggctttctggaactgctggctgggttgct

SEQ ID NO: 3009 - DNA, 50 bp, Homo sapiens
gctctgtgactttaagagaagaaggggggaggggtcccggattttatgtt

SEQ ID NO: 3010 - DNA, 50 bp, Homo sapiens
agaaatgtccttctttcactctgcatctttcttttctttgagtcgttttt

SEQ ID NO: 3011 - DNA, 50 bp, Homo sapiens
tccagataaagcaagaatagttgcaagaagtaaattctggcacaaagcgt

SEQ ID NO: 3012 - DNA, 50 bp, Homo sapiens
cccacaatggctttgattatgatttccccctgctgtgtgccgagctgcgg

SEQ ID NO: 3013 - DNA, 50 bp, Homo sapiens
aaattacagaaacatgttaaaggccggacaaaggaaagacaataaaatca

SEQ ID NO: 3014 - DNA, 50 bp, Homo sapiens
gaagtacgcggtcaaggcctgaggggcgcattgtcaataaagcacagctg

SEQ ID NO: 3015 - DNA, 50 bp, Homo sapiens
tctacagccatgtcctattccttgatcatccaaagcacctgcagagtcca

SEQ ID NO: 3016 - DNA, 50 bp, Homo sapiens
aatgtagcttaatcataatctcacactgaagattttgcatcacttttgct

SEQ ID NO: 3017 - DNA, 50 bp, Homo sapiens
tgatgatgatgttcaaagagaaagaaatggagtgattcagcacacaggcg

SEQ ID NO: 3018 - DNA, 50 bp, Homo sapiens
gccaccagccaagcaaccccctaaaacattcatatctaggcagtattttg

SEQ ID NO: 3019 - DNA, 50 bp, Homo sapiens
gcctttaccatgttctctccacatccgtaaataaacttccttcactacaa

SEQ ID NO: 3020 - DNA, 50 bp, Homo sapiens
ccacacctggcgagtaggccaagaaggaaaatctgacgaataaagacccc

SEQ ID NO: 3021 - DNA, 50 bp, Homo sapiens
gggctgagccccgcccagctcccctccacaataaacgctgtttctccttg

SEQ ID NO: 3022 - DNA, 50 bp, Homo sapiens
tttctcagcctacaaattgtgtctatacatttctaagccttgtttgcaga

SEQ ID NO: 3023 - DNA, 50 bp, Homo sapiens
gagcccacccccagcacccccatctgttaataaatatctcaactccaaaa

SEQ ID NO: 3024 - DNA, 50 bp, Homo sapiens
tggagtgatttcacagtgtgtactgttttgccacatacttctaaagaaca

SEQ ID NO: 3025 - DNA, 50 bp, Homo sapiens
ccctttggaaatggtgaaggaaccagcccaatagaagtacagagccagct

SEQ ID NO: 3026 - DNA, 50 bp, Homo sapiens
ctccctcaaggctgggaggagataaacaccaacccaggaattctcaataa

SEQ ID NO: 3027 - DNA, 50 bp, Homo sapiens
agggactgaaattgtggggggaaggtaggaggcacatcaataaagaggaa

SEQ ID NO: 3028 - DNA, 50 bp, Homo sapiens
tggggcaaaaccttgctaattttctcaaaagcatttatcattcttgttgc

SEQ ID NO: 3029 - DNA, 50 bp, Homo sapiens
cccccagtgtgcaagggcagtgaagacttgattgtacaaaatacgttttg

SEQ ID NO: 3030 - DNA, 50 bp, Homo sapiens
agatggcgagaacctaagtttcagttgattttacaattgaaatgactaaa

SEQ ID NO: 3031 - DNA, 50 bp, Homo sapiens
tgtcagaccttcttccacagcaaatgagatgtatgcccaaagcggtagaa

SEQ ID NO: 3032 - DNA, 50 bp, Homo sapiens
gttgcagggcgaggtcaagagagttctgacctggatggcccatagacctg

SEQ ID NO: 3033 - DNA, 50 bp, Homo sapiens
gacagcaggattggatgttgtgtattgtggtttattttattttcttcatt

SEQ ID NO: 3034 - DNA, 50 bp, Homo sapiens
agtgccttccctgcctgtgggggtcatgctgccacttttaatgggtcctc

SEQ ID NO: 3035 - DNA, 50 bp, Homo sapiens
tttggagtttttctgaaaaatggagcagtaatgcagcatcaacctattaa

SEQ ID NO: 3036 - DNA, 50 bp, Homo sapiens
caatggacaagtatttcctaatggtaccagaccactggacaggcttgggt

SEQ ID NO: 3037 - DNA, 50 bp, Homo sapiens
gtgttggagaggggctgtgtctgggtgagggatggcggggtactgatttt

SEQ ID NO: 3038 - DNA, 50 bp, Homo sapiens
gtgctttgagggtcagcctttaggaaggtgcagctttgttgtcctttgag

SEQ ID NO: 3039 - DNA, 50 bp, Homo sapiens
ggctcacatcaaaaggctaataggtgaatttgaccaacagcaagcagagt

SEQ ID NO: 3040 - DNA, 50 bp, Homo sapiens
cagaaagcaaacaacacaattacaaggttgaatctgaggaaaataatcct

SEQ ID NO: 3041 - DNA, 50 bp, Homo sapiens
tctctctgtgttctctgtattgtactaaccaacctcccaaatcgctgagc

SEQ ID NO: 3042 - DNA, 50 bp, Homo sapiens
cctggaataaaactcaacatgcagatttgcctactcatagggactttgcc

SEQ ID NO: 3043 - DNA, 50 bp, Homo sapiens
tgcctccctgatggaaaactatataaaattgtagacttaaaaggtttgtg

SEQ ID NO: 3044 - DNA, 50 bp, Homo sapiens
ttcattgtaaagatgttgatggtctcaataaaatgctaacttgccagtga

SEQ ID NO: 3045 - DNA, 50 bp, Homo sapiens
cgtccgcacggtacgtcttcatgggagtcattttattccttacagcttcc

SEQ ID NO: 3046 - DNA, 50 bp, Homo sapiens
tggtgtttggtttggggtgttttttaagttttttcttttatatcatccag

SEQ ID NO: 3047 - DNA, 50 bp, Homo sapiens
ctccctgctcttggttctcctctagattgaagtttgttttctgatgctgt

SEQ ID NO: 3048 - DNA, 50 bp, Homo sapiens
tgaagacatagttcacctaaaatggcatcctgctctgaatctagactttt

SEQ ID NO: 3049 - DNA, 50 bp, Homo sapiens
ccctttgagatttgtgtttgtgtcctgctttgagctgtaccttgtccagt

SEQ ID NO: 3050 - DNA, 50 bp, Homo sapiens; identical to SEQ ID NO: 477

SEQ ID NO: 3051 - DNA, 50 bp, Homo sapiens
ccagtgacacctctgaaagcccccattccctgagaatcctgttgttagta

SEQ ID NO: 3052 - DNA, 50 bp, Homo sapiens
cctggtcagtggtggtcttcaagacgacagctctgtatctgccatgtgaa

SEQ ID NO: 3053 - DNA, 50 bp, Homo sapiens
cccacttcccatgctggatgggcagaagacattgcttattggagacaaat

SEQ ID NO: 3054 - DNA, 50 bp, Homo sapiens
ttactggcatatgttttgtagactgtttaatgactggatatcttccttca

SEQ ID NO: 3055 - DNA, 50 bp, Homo sapiens
aatgtaaggttgttttgggggatggagttagaaccttaatgataatttct

SEQ ID NO: 3056 - DNA, 50 bp, Homo sapiens
tttggagtgggcaaagtaacctcttgcttggtgcaactatttgtttcaaa

SEQ ID NO: 3057 - DNA, 50 bp, Homo sapiens
gcttataaacacatttgaggaataggaggtccgggttttccataatgggt

SEQ ID NO: 3058 - DNA, 50 bp, Homo sapiens
tcttatcattgcatacattttctggatgcttgagccatcagatatcagct

SEQ ID NO: 3059 - DNA, 50 bp, Homo sapiens; identical to SEQ ID NO: 989

SEQ ID NO: 3060 - DNA, 50 bp, Homo sapiens
tgcattattgtgtagccacggttttctggaaaagttgatattttaggaat

SEQ ID NO: 3061 - DNA, 50 bp, Homo sapiens
attacattggaagggagctttcaagatggtaggatattgactaactgagc

SEQ ID NO: 3062 - DNA, 50 bp, Homo sapiens
catggtacaggcttggagcttgcaggtccctttctactgtggtgttggag

SEQ ID NO: 3063 - DNA, 50 bp, Homo sapiens
tgtgcagggacagttggcttccagaggtttcagctttcagttatttgaga

SEQ ID NO: 3064 - DNA, 50 bp, Homo sapiens
aattccattttattgggaacccattttccacctggtctttcttgacaggg

SEQ ID NO: 3065 - DNA, 50 bp, Homo sapiens
aaataaacttgtgtggtaaaagtacatgccatgtgtccctcaactgaaaa

SEQ ID NO: 3066 - DNA, 50 bp, Homo sapiens
ttcaagacaattttaattgtgaacctaccatgttgcctcccatcttctga

SEQ ID NO: 3067 - DNA, 50 bp, Homo sapiens
tttgtaagagctgggagcaaacacgtttatgagtgtgtcggaatcccgtg

SEQ ID NO: 3068 - DNA, 50 bp, Homo sapiens
cccaaacaggcatgtatcaaaacacctgtggagtactttagactccaaca

SEQ ID NO: 3069 - DNA, 50 bp, Homo sapiens
tggggccaaaagtccagtgaaattgtaagcttcaataaaaggatgaaact

SEQ ID NO: 3070 - DNA, 50 bp, Homo sapiens
tgggctggagtagaggactctggtgggaaggttttgctgctaatgtattt

SEQ ID NO: 3071 - DNA, 50 bp, Homo sapiens
agctaaacagtacttaaatagcggttggaactaggtagcctttcgaattt

SEQ ID NO: 3072 - DNA, 50 bp, Homo sapiens
tgtcattcatttttcagaatataaccactcaagctactggcacatagtga

SEQ ID NO: 3073 - DNA, 50 bp, Homo sapiens
tctgatagagaaaaagactgctttgtcactcaaacatgttccttcgacct

SEQ ID NO: 3074 - DNA, 50 bp, Homo sapiens; identical to SEQ ID NO: 1404

SEQ ID NO: 3075 - DNA, 50 bp, Homo sapiens
tttgatgttaaacagtaaatgccagtagtgaccaagaacacagtgattat

SEQ ID NO: 3076 - DNA, 50 bp, Homo sapiens
cctttgcctttatactttaggggtcttactccattaattcatttgttaca

SEQ ID NO: 3077 - DNA, 50 bp, Homo sapiens
tgcacgttatggtgtttctccctctcactgtctgagagtttagttgtagc

SEQ ID NO: 3078 - DNA, 50 bp, Homo sapiens
ctgtagagagtcttcaagatcccggagtggtagcgctgtctcctggtgaa

SEQ ID NO: 3079 - DNA, 50 bp, Homo sapiens; identical to SEQ ID NO: 960

SEQ ID NO: 3080 - DNA, 50 bp, Homo sapiens
gatccagaatccactctccagtctccctcccctgactccctctgctgtcc

SEQ ID NO: 3081 - DNA, 50 bp, Homo sapiens
attccattctattgtttacacaacgattactcgaagatgactgcaaaggt

SEQ ID NO: 3082 - DNA, 50 bp, Homo sapiens
agccaagaagagagcattaaacccaagaacattgtggagaagattgactt

SEQ ID NO: 3083 - DNA, 50 bp, Homo sapiens
tatattgtacttactgtgacagcagataataaaccagtctcttggagggc

SEQ ID NO: 3084 - DNA, 50 bp, Homo sapiens
cttattctcccattgggcagctgaggaccgaggcacagaggtgcggtgac

SEQ ID NO: 3085 - DNA, 50 bp, Homo sapiens
tcactgtataccactggagttttctggttatctctcgtatagcaaaatct

SEQ ID NO: 3086 - DNA, 50 bp, Homo sapiens
gctgccacctcctgttcatttagaactatgcaaagactccgcttccgttt

SEQ ID NO: 3087 - DNA, 50 bp, Homo sapiens
acagcaaagccccaactaatctttagaagcatattggaactgataactcc

SEQ ID NO: 3088 - DNA, 50 bp, Homo sapiens; identical to SEQ ID NO: 530

SEQ ID NO: 3089 - DNA, 50 bp, Homo sapiens
gtcaacatcatccggcaccctctggggtaggagaacagccattccacatg

SEQ ID NO: 3090 - DNA, 50 bp, Homo sapiens
tcatatgtgtggttatactcataataatgggccttgtaagccttttcacc

SEQ ID NO: 3091 - DNA, 50 bp, Homo sapiens
ctgcttgactcaccggcttcctatttgatgcacccaggcccccttgtggc

SEQ ID NO: 3092 - DNA, 50 bp, Homo sapiens
gggacagaaacacaaacgcaaaaaattcagacaaaagcagtaatgtttaa

SEQ ID NO: 3093 - DNA, 50 bp, Homo sapiens
gcgatcctcatcccttcagcaatatgtatttgagttcacactatttctgt

SEQ ID NO: 3094 - DNA, 50 bp, Homo sapiens
ttttgaacagcgaaaccagcgtttgcgagggagccccaatttcacaccag

SEQ ID NO: 3095 - DNA, 50 bp, Homo sapiens
ttccaaaagaaaaactagttgcagtcagggagccagcgaaaagacaaaaa

SEQ ID NO: 3096 - DNA, 50 bp, Homo sapiens
actgagagtggtgtctggatatattccttttgtcttcatcactttctgaa

SEQ ID NO: 3097 - DNA, 50 bp, Homo sapiens
gcatgcattcattggttgttcaataagtgagatgattacagataatactg

SEQ ID NO: 3098 - DNA, 50 bp, Homo sapiens
ctgatttcataaccaggccggaccacgtgcaatagggtggaaaccaaact

SEQ ID NO: 3099 - DNA, 50 bp, Homo sapiens
gaagacgacgcggattactactgctctgttggctacggctttagtcccta

SEQ ID NO: 3100 - DNA, 50 bp, Homo sapiens
tgaacctcagcccattaggcaggaaaagttgatatttaataaacaaggaa

SEQ ID NO: 3101 - DNA, 50 bp, Homo sapiens
ccaaggcacttggtttttctgttttatatactaataatcagggcctaagt

SEQ ID NO: 3102 - DNA, 50 bp, Homo sapiens
gggggccattcgattcgcctcagttgctgctgtaataaaagtctactttt

SEQ ID NO: 3103 - DNA, 50 bp, Homo sapiens
actttaagaaaaaacaaataattgttgcagaggtctctgtattttgcagc

SEQ ID NO: 3104 - DNA, 50 bp, Homo sapiens
ctgtaccagtgctggctgcaggtattaagtccaagtttattaactagata

SEQ ID NO: 3105 - DNA, 50 bp, Homo sapiens
gccacctctgtgttcctgtcatagcaaatatgggaccatcaccagcttac

SEQ ID NO: 3106 - DNA, 50 bp, Homo sapiens
tcctgaggtgatatacttcatatttgtaatcaactgaaagagctgtgcat

SEQ ID NO: 3107 - DNA, 50 bp, Homo sapiens
tgctgggtttgccatctttttgttttctttgaaaagcagcttagttaccc

SEQ ID NO: 3108 - DNA, 50 bp, Homo sapiens
ccactagttgatgtatggtatctttagatatttgcctgtctgtttgctca

SEQ ID NO: 3109 - DNA, 50 bp, Homo sapiens
aatggcctacaaccaagctatttgtcccctactttgagtcttaactgtgg

SEQ ID NO: 3110 - DNA, 50 bp, Homo sapiens
atcctgagctgcacttacctgtgagagtcttcaaacttttaaaccttgcc

SEQ ID NO: 3111 - DNA, 50 bp, Homo sapiens
tgctctgagatggggaacagaacacacaagtatgaagtttctttcaggtg

SEQ ID NO: 3112 - DNA, 50 bp, Homo sapiens
aagcacacccgtggttgtgaaaatagtatagcaaaaaagaaaaatccccg

SEQ ID NO: 3113 - DNA, 50 bp, Homo sapiens
tgtttacctgcttgcagcatattagaacagacgatccatgctaatattgt

SEQ ID NO: 3114 - DNA, 50 bp, Homo sapiens
aatccttacttaaaattcttccgttaccacccttgaaacaattagctttt

SEQ ID NO: 3115 - DNA, 50 bp, Homo sapiens
ataacagttctatttggaatgatacccacaactctacaagcatcttatcc

SEQ ID NO: 3116 - DNA, 50 bp, Homo sapiens
agagatttgtacatttgtgtaataggccttttcatgctttatgtgtagct

SEQ ID NO: 3117 - DNA, 50 bp, Homo sapiens
tcttggtgtatttcttatgcaaacaatcttcaggcagcaaagatgtctgt

SEQ ID NO: 3118 - DNA, 50 bp, Homo sapiens
aacctgtactgttggtattgtgttagtgtatggaccaatactgcctgtaa

SEQ ID NO: 3119 - DNA, 50 bp, Homo sapiens
aattgagggaccatcagataactgtattttgtcaggtgcaataaaaacaa

SEQ ID NO: 3120 - DNA, 50 bp, Homo sapiens
ctatgtgtactcctcatccctcctgctgtatattttctcattttttgcgt

SEQ ID NO: 3121 - DNA, 50 bp, Homo sapiens
ttaaaagtaacaaaaactgccatttgacagtaaaggctcttggcttctgt

SEQ ID NO: 3122 - DNA, 50 bp, Homo sapiens
gctcccttctctttgatagcagttataatgcccttgttcccaataaaact

SEQ ID NO: 3123 - DNA, 50 bp, Homo sapiens
ctgagatactgctgctggaatgggcgagacattgctgcaaagaagtcaag

SEQ ID NO: 3124 - DNA, 50 bp, Homo sapiens
ctgcggcgtgttaggaatgacctggaattgtcaataaacagatgctgctg

SEQ ID NO: 3125 - DNA, 50 bp, Homo sapiens
agctccctagctgaacgggttaccctggtcattaataaagctgtgactgg

SEQ ID NO: 3126 - DNA, 50 bp, Homo sapiens
ctcatctaaagacaccttcctttccactggctgtcaagccacagggcacc

SEQ ID NO: 3127 - DNA, 50 bp, Homo sapiens
ggcagaatccacaccagcttatcaaccaacacagctaattttagaatagg

SEQ ID NO: 3128 - DNA, 50 bp, Homo sapiens
gacaggacagtgaccttgggaggaaggggctactccgccatccttaaaag

SEQ ID NO: 3129 - DNA, 50 bp, Homo sapiens
ggacaagttggaacagaagaccaagagtggcctcactggatacatcaagg

SEQ ID NO: 3130 - DNA, 50 bp, Homo sapiens
ccccaattctgtggcgcatccagattgtgaaaatgtacaataaatgtgta

SEQ ID NO: 3131 - DNA, 50 bp, Homo sapiens
ttcagagaactttttgcatgcttatggttgatcagttaaaaaagaatgtt

SEQ ID NO: 3132 - DNA, 50 bp, Homo sapiens
tgctgtttctgtagccatattgtattctgtgtcaaataaagtccagttgg

SEQ ID NO: 3133 - DNA, 50 bp, Homo sapiens
acgccacccaaacctttcactttccaaagagctagccgtcctccacccag

SEQ ID NO: 3134 - DNA, 50 bp, Homo sapiens
gcatctgagatcctgttggaaaccacagcaacctgtattcattattagga

SEQ ID NO: 3135 - DNA, 50 bp, Homo sapiens
ggacgtgacctgtgctgagggctgtgagaatgtgaaacaacagtgtgaaa

SEQ ID NO: 3136 - DNA, 50 bp, Homo sapiens
gccatcagattgatcttcttcacaccaagctctgtttacattccgagagg

SEQ ID NO: 3137 - DNA, 50 bp, Homo sapiens
cctttcctcacagggaccaagacaaagcatgggacatgaaattaagagtg

SEQ ID NO: 3138 - DNA, 50 bp, Homo sapiens
aagcatgattcccacaaggactaagtatcagtgatttgtaattttcctgt

SEQ ID NO: 3139 - DNA, 50 bp, Homo sapiens
acctgttggttttaatgtgcatgtgaatggcctagagaacctatttttgt

SEQ ID NO: 3140 - DNA, 50 bp, Homo sapiens
ccgaccaagatccctccctgcaagacagatgggaatgtgtataataacta

SEQ ID NO: 3141 - DNA, 50 bp, Homo sapiens; identical to SEQ ID NO: 890

SEQ ID NO: 3142 - DNA, 50 bp, Homo sapiens
ggacggtgtccccgcacgtttgtattgtgtataaatacattcattaataa

SEQ ID NO: 3143 - DNA, 50 bp, Homo sapiens
atcctttcctcaacctcctcctttcccaattaatttcaaccatagtacga

SEQ ID NO: 3144 - DNA, 50 bp, Homo sapiens
gccagctatgtcctctaggaaatgacagacccaaccaccagcaataaaca

SEQ ID NO: 3145 - DNA, 50 bp, Homo sapiens
ctgtaaaaagacaattcatctcattgtgagtggaagtagttatctggaat

SEQ ID NO: 3146 - DNA, 50 bp, Homo sapiens
gcatttcagaatgtgtcttttgaagggctataccagttattaaatagtgt

SEQ ID NO: 3147 - DNA, 50 bp, Homo sapiens
ccagggtttctgcactggtcccctcttttcccttcagtcttcttcacttc

SEQ ID NO: 3148 - DNA, 50 bp, Homo sapiens
acactgctacaccattactttcttgagacatttgtaagtcctttgataca

SEQ ID NO: 3149 - DNA, 50 bp, Homo sapiens
tgaataactagtgataccctcaataaaacagggattgccaagaagggaac

SEQ ID NO: 3150 - DNA, 50 bp, Homo sapiens
acctttaacatgtaaagatgctcaccttgttcagaagagaataaaccagt

SEQ ID NO: 3151 - DNA, 50 bp, Homo sapiens
tatgtcataaacatgtaaataaaagatgttgaatcttgttgaaagcgcgg

SEQ ID NO: 3152 - DNA, 50 bp, Homo sapiens
ttgtattctggaagcgtgaattgcttttgaagtctgtcagtattactggt

SEQ ID NO: 3153 - DNA, 50 bp, Homo sapiens
tttgtaagcgaaggagatggaggtcgtcttaaaccagagagctactgaat

SEQ ID NO: 3154 - DNA, 50 bp, Homo sapiens
actcacaacttcttaagctaaatggtattttcatttttctcaagctctcc

SEQ ID NO: 3155 - DNA, 50 bp, Homo sapiens
agtttagcaatatgacattcttggtgacagtggaatctttgtctcttcac

SEQ ID NO: 3156 - DNA, 50 bp, Homo sapiens
gccactgaccttggctcaccttagaggaatttcctcgagaacaacagaga

SEQ ID NO: 3157 - DNA, 50 bp, Homo sapiens
acttctgtctttgctggaaagtgtatttgtgcataaataaagtctgtgta

SEQ ID NO: 3158 - DNA, 50 bp, Homo sapiens
ttctctttcttcacaatgtatgtcctcagtggtacctattattgatgcct

SEQ ID NO: 3159 - DNA, 50 bp, Homo sapiens
ctgtgacccgctcccgcctcatgagcaaggagagtggttcatcaatgatt

SEQ ID NO: 3160 - DNA, 50 bp, Homo sapiens; identical to SEQ ID NO: 77

SEQ ID NO: 3161 - DNA, 50 bp, Homo sapiens
agaacttccaaatgctgagcccagatccaaagttgtcttctgtccacgag

SEQ ID NO: 3162 - DNA, 50 bp, Homo sapiens
tgacaaattagaagaacggcctcacctgccatccaccttcaactacaacc

SEQ ID NO: 3163 - DNA, 50 bp, Homo sapiens
tggatattttaacctgttaagtgtgtgtgtgttttctgtacccaaccaga

SEQ ID NO: 3164 - DNA, 50 bp, Homo sapiens
taaatagggaagatggagacacctctgggggtcctctctgagtcaaatcc

SEQ ID NO: 3165 - DNA, 50 bp, Homo sapiens
tgtgttaggttgaataaggtgtggaaaatgcttttctgttagtagaatgc

SEQ ID NO: 3166 - DNA, 50 bp, Homo sapiens
gcagtaaccactgaacgtcaatcagccctccatggggttctttcgatttt

SEQ ID NO: 3167 - DNA, 50 bp, Homo sapiens
gtttgaagttgtgactctcctgctaccaattaaataaagcttactttgcc

SEQ ID NO: 3168 - DNA, 50 bp, Homo sapiens
tgcaagatgaatggctaatattttggtgcagtgtttgatgttcaaaacaa

SEQ ID NO: 3169 - DNA, 50 bp, Homo sapiens
ctgcctgttcagaactgtttaatagcagttactcttgagtgtatttacct

SEQ ID NO: 3170 - DNA, 50 bp, Homo sapiens
attctagagtttggaatgcaaaattaattgttttaccctcaagctgggaa

SEQ ID NO: 3171 - DNA, 50 bp, Homo sapiens
tggggtgaatttgttaaaatgagtaactttgataaagtttttcatgcaca

SEQ ID NO: 3172 - DNA, 50 bp, Homo sapiens
aaaagtatagagttggaaactctgggaaaacttacggaaatacacaaatg

SEQ ID NO: 3173 - DNA, 50 bp, Homo sapiens; identical to SEQ ID NO: 1619

SEQ ID NO: 3174 - DNA, 50 bp, Homo sapiens
tacaatgcttccaaactggaactctacattttgtatcttttaaagctcct

SEQ ID NO: 3175 - DNA, 50 bp, Homo sapiens; identical to SEQ ID NO: 1584

SEQ ID NO: 3176 - DNA, 50 bp, Homo sapiens; identical to SEQ ID NO: 1632

SEQ ID NO: 3177 - DNA, 50 bp, Homo sapiens
tggtgtttgattattggaatggtgccatattgtcactccttctacttgct

SEQ ID NO: 3178 - DNA, 50 bp, Homo sapiens; identical to SEQ ID NO: 1640

SEQ ID NO: 3179 - DNA, 50 bp, Homo sapiens
ggctaaacgattcttactcagtgtgatgtataatgatgcaacagggaccc

SEQ ID NO: 3180 - DNA, 50 bp, Homo sapiens; identical to SEQ ID NO: 1592

SEQ ID NO: 3181 - DNA, 50 bp, Homo sapiens
ataccttctgaacgggaagagacagccagcacagtgtttatgccactggt

SEQ ID NO: 3182 - DNA, 50 bp, Homo sapiens
ttccactagtatatccctgttgatttgtttgtgccttttattaactgcca

SEQ ID NO: 3183 - DNA, 50 bp, Homo sapiens
tcatctgtgccatgctctagaaccttgaccttgatagttcaccacgtctg

SEQ ID NO: 3184 - DNA, 50 bp, Homo sapiens
actgcccttaactctggtatacaccaaaaagaaatctttactttccttgt

SEQ ID NO: 3185 - DNA, 50 bp, Homo sapiens
aggcagcctttctttaatgttttcagttggtttgtattttgtagctcagt

SEQ ID NO: 3186 - DNA, 50 bp, Homo sapiens
ccagaatggtctttaatgagcatggaacctgagcaaagggaataggtggg

SEQ ID NO: 3187 - DNA, 50 bp, Homo sapiens
tctctctctacactgtggtgcacttaacttgtggaatttttatactaaaa

SEQ ID NO: 3188 - DNA, 50 bp, Homo sapiens
actcagcctaaggaaacaagtacactccacacatgcataaaggaaatcaa

SEQ ID NO: 3189 - DNA, 50 bp, Homo sapiens; identical to SEQ ID NO: 476

SEQ ID NO: 3190 - DNA, 50 bp, Homo sapiens
tttgcatcatgtagtcattgagtgagggggagatataagccaaggatttt

SEQ ID NO: 3191 - DNA, 50 bp, Homo sapiens
gcttacttcacaatgtgcccaggtcagctgtataaaataaatactgcatt

SEQ ID NO: 3192 - DNA, 50 bp, Homo sapiens
tgtaatggttggtttattgttctataaccccagcccatcattttctgtgt

SEQ ID NO: 3193 - DNA, 50 bp, Homo sapiens
agtcaatgtttcgtgttccgcattatttgaaccatttgcccttacagaaa

SEQ ID NO: 3194 - DNA, 50 bp, Homo sapiens
agggagcagtgcttttgggtcctagaacctgttgagtttctaatgaatat

SEQ ID NO: 3195 - DNA, 50 bp, Homo sapiens
aatgacttgttatagctcagtgtgcccttgaatccatacagtttcttaaa

SEQ ID NO: 3196 - DNA, 50 bp, Homo sapiens
tgttttgttttctgggttttgttttttgtttttgtctgtgcaagacctgc

SEQ ID NO: 3197 - DNA, 50 bp, Homo sapiens; identical to SEQ ID NO: 455

SEQ ID NO: 3198 - DNA, 50 bp, Homo sapiens
cctgacctgtgcaataaggattgttccctgcgaagttttgttggatgtaa

SEQ ID NO: 3199 - DNA, 50 bp, Homo sapiens
gagtctggggtaagggtgggggttgaaagttgttatctttaaatacatgt

SEQ ID NO: 3200 - DNA, 50 bp, Homo sapiens
ttgatctgccaaggatttcctctcagagctgttgcacagacagagattgt

SEQ ID NO: 3201 - DNA, 50 bp, Homo sapiens
gggggtttccacaatgtgagggggaaccaagaaaattttaaatacagtgt

SEQ ID NO: 3202 - DNA, 50 bp, Homo sapiens
tgcctgtcccaagttttgttccattttttaaaaatttgttgtaaactgca

SEQ ID NO: 3203 - DNA, 50 bp, Homo sapiens
tattgttacatatgtttgcatcaagctagcagccaagaggttaattgtgc

SEQ ID NO: 3204 - DNA, 50 bp, Homo sapiens
aaaccagaacaagcaacaaactgtatttatgcaagcaaaattgatgagaa

SEQ ID NO: 3205 - DNA, 50 bp, Homo sapiens
tgatgtttctgaatactaccaaacagccatacatgtctgcaatgaagaga

SEQ ID NO: 3206 - DNA, 50 bp, Homo sapiens
tatcatcctccttctcaacccatctccctaaccccacatgcttgccagtt

SEQ ID NO: 3207 - DNA, 50 bp, Homo sapiens
ttctgaaattgggaaacatttattttaaatgcaatcaggtagtgttgctt

SEQ ID NO: 3208 - DNA, 50 bp, Homo sapiens
gactgaatttgacatctggtatgctggtatgtagctcatacatcaagagt

SEQ ID NO: 3209 - DNA, 50 bp, Homo sapiens
ttgtacttttcagaaccattttgtctcattattcctgttttagctgaaga

SEQ ID NO: 3210 - DNA, 50 bp, Homo sapiens
ctggctgtgtcacagggtgagccccaaaattggggttcagcgtgggaggc

SEQ ID NO: 3211 - DNA, 50 bp, Homo sapiens
aatggtcccctgtgtttgtagagaactcccttatacagagttttggttct

SEQ ID NO: 3212 - DNA, 50 bp, Homo sapiens
ttctttcatgtcctccctacttcctcagtgtcaatcagattaaagtgtgt

SEQ ID NO: 3213 - DNA, 50 bp, Homo sapiens
tttgaactttggtcatagagtcttcatatttcagtatttggtggtcccta

SEQ ID NO: 3214 - DNA, 50 bp, Homo sapiens
accctagagttactctcttttgggaacataaggaggtatacagaactgca

SEQ ID NO: 3215 - DNA, 50 bp, Homo sapiens
ttgatgtgtcacaaaacattactcatttgatttcccccacccccgccaac

SEQ ID NO: 3216 - DNA, 50 bp, Homo sapiens
tcagggcgtttgaatgtgaattaggaccagcgcaatgaatgctcaagttg

SEQ ID NO: 3217 - DNA, 50 bp, Homo sapiens
agttcccagtctcttctgtcctgcagcccttgcctctttcccacaggttc

SEQ ID NO: 3218 - DNA, 50 bp, Homo sapiens
gtagaatcaggcactgctcgcagaaggaacacagattgtagagattaaca

SEQ ID NO: 3219 - DNA, 50 bp, Homo sapiens
ttttctcagcgcagttttgttttgtgtgtccattggattacaaactttat

SEQ ID NO: 3220 - DNA, 50 bp, Homo sapiens
tgcctcattatcttgcagctgtaaacatattggaatgtacatgtcaataa

SEQ ID NO: 3221 - DNA, 50 bp, Homo sapiens
gccatagcctgaatcttttaggggtattaaggtcagcctctcactcttcc

SEQ ID NO: 3222 - DNA, 50 bp, Homo sapiens
agccgccttccaggcccgctatgcagacatctttccctccaaggtttgtc

SEQ ID NO: 3223 - DNA, 50 bp, Homo sapiens
agcagctttcttcaagtcgctctttagccctttgtggttaatctctcagt

SEQ ID NO: 3224 - DNA, 50 bp, Homo sapiens
tgcactgatacaacattaccattcttctatggaaagaaaacttttgatga

SEQ ID NO: 3225 - DNA, 50 bp, Homo sapiens
atagaggaggaggcacttcaggggtgaggcggaggaggagtcaacgtatt

SEQ ID NO: 3226 - DNA, 50 bp, Homo sapiens
atacccacacagcaactggtccactgctttactgtctgttggataatggc

SEQ ID NO: 3227 - DNA, 50 bp, Homo sapiens
agatttgtgtcctctcattccctctcttcctcttgtaagtgcccttctaa

SEQ ID NO: 3228 - DNA, 50 bp, Homo sapiens
gcactgtttttaaacccaagtaaagactgcttgaaacctgttgatggaaa

SEQ ID NO: 3229 - DNA, 50 bp, Homo sapiens
agatttcccctcagtttccattgacttagatcaggttacagagaaaggca

SEQ ID NO: 3230 - DNA, 50 bp, Homo sapiens
agatcgagatcttcagtcctctgcttcatctgtgagcttgccttcagtca

SEQ ID NO: 3231 - DNA, 50 bp, Homo sapiens; identical to SEQ ID NO: 1184

SEQ ID NO: 3232 - DNA, 50 bp, Homo sapiens
tggcactctgtggctccttgtagtattatagctatactgggaaagcatag

SEQ ID NO: 3233 - DNA, 50 bp, Homo sapiens; identical to SEQ ID NO: 1204

SEQ ID NO: 3234 - DNA, 50 bp, Homo sapiens
aattgaccaacctaatgttacaactactttgaggtggccaaatgtaaact

SEQ ID NO: 3235 - DNA, 50 bp, Homo sapiens
ctactacgctgccctgggtgctgtaggagcccatctgactcaccagaaat

SEQ ID NO: 3236 - DNA, 50 bp, Homo sapiens
aaggcctcagttttaattattttcttcccaaaataaatcacacatttggt

SEQ ID NO: 3237 - DNA, 50 bp, Homo sapiens
ggtggggtgatagggtgggctaaaaaccatgcactctggaatttgttgta

SEQ ID NO: 3238 - DNA, 50 bp, Homo sapiens
agaggcagcttctagacagagttgcttaatgaaagggtttgtaatacttt

SEQ ID NO: 3239 - DNA, 50 bp, Homo sapiens; identical to SEQ ID NO: 1582

SEQ ID NO: 3240 - DNA, 50 bp, Homo sapiens
caacggccaggagaagcactttaaggacgaggacgaggacgaggacgtgg

SEQ ID NO: 3241 - DNA, 50 bp, Homo sapiens
atacagccccggcagaaaacgcctaaagtcagatgagagaccagtacata

SEQ ID NO: 3242 - DNA, 50 bp, Homo sapiens
accagaaacttcaaatgtgtcacaaaagatgagcagaactatcccgaggt

SEQ ID NO: 3243 - DNA, 50 bp, Homo sapiens
aaagcgaagtcatgggagagccacacttgatggtggaatataaacttggt

SEQ ID NO: 3244 - DNA, 50 bp, Homo sapiens
tccctgccataacatcttttgccacgtatagctggaattaagtgttgtct

SEQ ID NO: 3245 - DNA, 50 bp, Homo sapiens
ctggtgactccacacttccaacctgctctaaaaaacgcaaaatagaacag

SEQ ID NO: 3246 - DNA, 50 bp, Homo sapiens
tgtgtagtggatggagtttactgtttgtggaataaaaacggctgtttccg

SEQ ID NO: 3247 - DNA, 50 bp, Homo sapiens
acagggatttcttatgtctttggctacactagatattttgtgattggcaa

SEQ ID NO: 3248 - DNA, 50 bp, Homo sapiens
aggcctgagtgtgtgcgggagaccaaataaaccggcttgggtgcgcaaaa

SEQ ID NO: 3249 - DNA, 50 bp, Homo sapiens
aagaaagaagagagagaacttgatgccaagtccacgaaaaaacaattttt

SEQ ID NO: 3250 - DNA, 50 bp, Homo sapiens
gatccagctgtgcttaagagccagtaatgtcttaataaacatgtggcagc

SEQ ID NO: 3251 - DNA, 50 bp, Homo sapiens
aagcacttgttttattttgtgtgtggagtataaaggctacacccttattg

SEQ ID NO: 3252 - DNA, 50 bp, Homo sapiens
cctttttctacagaatcatcaggcatgggtaaggtggctaacgctgagat

SEQ ID NO: 3253 - DNA, 50 bp, Homo sapiens
tgggtatgttctagagatttaccaccattgcttattgcttttttctttaa

SEQ ID NO: 3254 - DNA, 50 bp, Homo sapiens
tcttcttgatagatgaggccatggtgtaaatggaagtttcagagaggaca

SEQ ID NO: 3255 - DNA, 50 bp, Homo sapiens
gtgggttggtcccactaatggaaatggaaatgcctgagccaggccagcgg

SEQ ID NO: 3256 - DNA, 50 bp, Homo sapiens
aatctattcctgcacctgttacggtttctggaagcagttaataaaaagta

SEQ ID NO: 3257 - DNA, 50 bp, Homo sapiens
gcatggagtcaggagaaaaccaccttcataaactgctctgtgcaaagagg

SEQ ID NO: 3258 - DNA, 50 bp, Homo sapiens
acaaatgcccctgtttatcaataggtgactacttactacacatggaacca

SEQ ID NO: 3259 - DNA, 50 bp, Homo sapiens
tgattatatgcagattcctagtagcatgccttacctacagcactatgtgc

SEQ ID NO: 3260 - DNA, 50 bp, Homo sapiens
ggtcattgagcctcaggtagggaatatatcaacccgatttcttcctctct

SEQ ID NO: 3261 - DNA, 50 bp, Homo sapiens
tttcaaagtgcccagactgtgtacaaagacacatgtaatggagattgtac

SEQ ID NO: 3262 - DNA, 50 bp, Homo sapiens
aggaccgaagtgtttcaagtggatctcagtaaaggatctttggagccaga

SEQ ID NO: 3263 - DNA, 50 bp, Homo sapiens
agtttcactgtcagagatattgtaggtgctaatactggatttcgtctcag

SEQ ID NO: 3264 - DNA, 50 bp, Homo sapiens
agttagaagagcaatatgtttccttctctgtaacagtgtcctaacagtga

SEQ ID NO: 3265 - DNA, 50 bp, Homo sapiens
agctgccacttcccagaagcctacataattatttgctctatgaagacgtt

SEQ ID NO: 3266 - DNA, 50 bp, Homo sapiens
gccactaataacattgggctaatatctgctgtgcttctctgacaggtagt

SEQ ID NO: 3267 - DNA, 50 bp, Homo sapiens
agcatgcagttctctgtgaaatctcaaatattgttgtaatagtctgtttc

SEQ ID NO: 3268 - DNA, 50 bp, Homo sapiens
tgaatctatcccccaagaaaccatcttatccctgtaataaatcagcatgt

SEQ ID NO: 3269 - DNA, 50 bp, Homo sapiens
gtgcttccaggcggcactgacagcctcagtaacaataaaaacaatggtag

SEQ ID NO: 3270 - DNA, 50 bp, Homo sapiens
gtccatgtttctaggggtattcatttgctttctcgttgaaacctgttgtt

SEQ ID NO: 3271 - DNA, 50 bp, Homo sapiens
taggtccataaatgttgtaataaatattcctttgatcttggtgtttgcgt

SEQ ID NO: 3272 - DNA, 50 bp, Homo sapiens
gctagtacctgttatttattacctggaggcctgtccagcacccaccctac

SEQ ID NO: 3273 - DNA, 50 bp, Homo sapiens
cccactatgcacagattaaacttcacctacaaactccttaatatgatctg

SEQ ID NO: 3274 - DNA, 50 bp, Homo sapiens
tgtgctctgttttaccttactctgtttagaaaagtatacaagcgtgtttt

SEQ ID NO: 3275 - DNA, 50 bp, Homo sapiens
tgagtgtgtctctggattttgaccccttattgattcattgtaatatgtaa

SEQ ID NO: 3276 - DNA, 50 bp, Homo sapiens
acatttgtaagggctctcaaagattcacacatgcctatattatcataaga

SEQ ID NO: 3277 - DNA, 50 bp, Homo sapiens
tccgcatccattatttaaaccagtggaaattgtctctatttttggaaagt

SEQ ID NO: 3278 - DNA, 50 bp, Homo sapiens
acggagctgtagtgccattagaaactgtgaatttccaaataaatctgaac

SEQ ID NO: 3279 - DNA, 50 bp, Homo sapiens
agccttcagtttcttaaatgaaatcaaatgttccttcagtacaggtaact

SEQ ID NO: 3280 - DNA, 50 bp, Homo sapiens
ccagacccccatcacttgatgggccacacaagtttgagagtggtacaagg

SEQ ID NO: 3281 - DNA, 50 bp, Homo sapiens
tcaggttaaacccagcagcagcaaagaactccccagtgacttccagttat

SEQ ID NO: 3282 - DNA, 50 bp, Homo sapiens
ggtgggcatttttgggctacctggttcgtttttataagattttgctgggt

SEQ ID NO: 3283 - DNA, 50 bp, Homo sapiens
agtgcaataatactgtatagctttcccccacctcccacaaaatcacccag

SEQ ID NO: 3284 - DNA, 50 bp, Homo sapiens
aatcatgttgcagaaccagcaggtggatagtatataggtttatgcctggg

SEQ ID NO: 3285 - DNA, 50 bp, Homo sapiens
ggtgcagcgtgtcagacacaacattcatgttactcttacattggaatctg

SEQ ID NO: 3286 - DNA, 50 bp, Homo sapiens
ggactgacaccacagatgacagccccacctccttgagctttatttaccta

SEQ ID NO: 3287 - DNA, 50 bp, Homo sapiens
acgacccattttgcaagacttaaagccggaagaacacattttcagattgt

SEQ ID NO: 3288 - DNA, 50 bp, Homo sapiens
aggaattactgtaacaaaatatgtatgtccgaagggaaaaagctgcaagg

SEQ ID NO: 3289 - DNA, 50 bp, Homo sapiens
tcctgtggaatctgatatgtctggtagcatgtcattgatgggacatgaag

SEQ ID NO: 3290 - DNA, 50 bp, Homo sapiens
atggcactaggcagcatttgtatagtaactaatggcaaaaattcatggct

SEQ ID NO: 3291 - DNA, 50 bp, Homo sapiens
atttgattaaaattatttcccactgacctaaactttcagtgatttgtggg

SEQ ID NO: 3292 - DNA, 50 bp, Homo sapiens
aaagcaagtgttttgtacatttcttttcaaaaagtgccaaatttgtcagt

SEQ ID NO: 3293 - DNA, 50 bp, Homo sapiens
aatctgcactgatattacatccacagtaccacagtatttatgtgtatgaa

SEQ ID NO: 3294 - DNA, 50 bp, Homo sapiens
atggtagctgagccaaacacgtaggatttccgttttaaggttcacatgga

SEQ ID NO: 3295 - DNA, 50 bp, Homo sapiens
aagccagaacctgctgttttcagggtgggtgatgtaaatatagtgtgtac

SEQ ID NO: 3296 - DNA, 50 bp, Homo sapiens; identical to SEQ ID NO: 3162

SEQ ID NO: 3297 - DNA, 50 bp, Homo sapiens
tctttctggtttctggagataacccatcaataaaagctgcttcctctggt

SEQ ID NO: 3298 - DNA, 50 bp, Homo sapiens
gggacccctcctacccttgactcctctgtgctttggtaataaattgtttt

SEQ ID NO: 3299 - DNA, 50 bp, Homo sapiens
gttctgaatgctgtcctcaaagtatataatgtttcatgtaccaagaccct

SEQ ID NO: 3300 - DNA, 50 bp, Homo sapiens
gacatctgctccctcctcctgcaacacagcccagccctgaaggccatccg

SEQ ID NO: 3301 - DNA, 50 bp, Homo sapiens
tgggaagatcctgacctcctccaaggaagaaatccagaaagccttaagac

SEQ ID NO: 3302 - DNA, 50 bp, Homo sapiens
agccagtgatctctctgactttcaatcagtttccaagcttaaccagggca

SEQ ID NO: 3303 - DNA, 50 bp, Homo sapiens
aaacgcatccgctatctctacaaacactttaaccgacatgggaagtttcg

SEQ ID NO: 3304 - DNA, 50 bp, Homo sapiens; identical to SEQ ID NO: 745

SEQ ID NO: 3305 - DNA, 50 bp, Homo sapiens
ttccaggcttttgctactcttcactcagctacaataaacatcctgaatgt

SEQ ID NO: 3306 - DNA, 50 bp, Homo sapiens
acacctagtcatagaaatcagtctctctggtttgttttgtattatgttgt

SEQ ID NO: 3307 - DNA, 50 bp, Homo sapiens
cactgcttccttctgctccaggcctcaattttcccttcttgtaaaatgga

SEQ ID NO: 3308 - DNA, 50 bp, Homo sapiens
actttcggagggagtttattattgagtctttatctgtgacagtatttgga

SEQ ID NO: 3309 - DNA, 50 bp, Homo sapiens
atagagaggtaattaaattgctggagccaactatttcacaacttctgtaa

SEQ ID NO: 3310 - DNA, 50 bp, Homo sapiens
gttccaccagtatttaccaggaaaacaaagaatgtgttaagggatgctcc

SEQ ID NO: 3311 - DNA, 50 bp, Homo sapiens
tgctatttcctattttcaccaaaattggggaaggagtgccactttccagc

SEQ ID NO: 3312 - DNA, 50 bp, Homo sapiens
tgctgccacttttcaattctgtcagtgcttccacatggaaacaaaatgca

SEQ ID NO: 3313 - DNA, 50 bp, Homo sapiens
tcactttctgtattttaattttgttgaagggctgattgggatttccatgt

SEQ ID NO: 3314 - DNA, 50 bp, Homo sapiens
gcatgaagagacatagccttttagttttgctaattgtgaaatggaaatgc

SEQ ID NO: 3315 - DNA, 50 bp, Homo sapiens
tgttgtccctgaacttagctaaatggtgcaacttagtttctccttgcttt

SEQ ID NO: 3316 - DNA, 50 bp, Homo sapiens
tcatagtgtcagtgaggtcccgtgagtctttgtgagtccttgtgtcatcg

SEQ ID NO: 3317 - DNA, 50 bp, Homo sapiens
gtgcgtagaatattacgtatgcatgttcatgtctaaagaatggctgttga

SEQ ID NO: 3318 - DNA, 50 bp, Homo sapiens; identical to SEQ ID NO: 1463

SEQ ID NO: 3319 - DNA, 50 bp, Homo sapiens
ggacattggttattttatgctttcttggatataaccatgatcagagtgcc

SEQ ID NO: 3320 - DNA, 50 bp, Homo sapiens
gcaagtgtaggagtggtgggcctgaactgggccattgatcagactaaata

SEQ ID NO: 3321 - DNA, 50 bp, Homo sapiens
aatcagaagagcctggaaaaagacctagcccaacttcccttgtgggaaac

SEQ ID NO: 3322 - DNA, 50 bp, Homo sapiens
tcaacaaaggggattttgtacacataacatgggttatttagtttaactct

SEQ ID NO: 3323 - DNA, 50 bp, Homo sapiens
cttttgtgcagcgactatgttggtgttaggggtggtgtggagattgttaa

SEQ ID NO: 3324 - DNA, 50 bp, Homo sapiens
atttatgccttaaatgttttcttccccattccttcctccccctcggtagg

SEQ ID NO: 3325 - DNA, 50 bp, Homo sapiens
tttgtatttgtgaactcatctgtgggaggagtaaagaaaatccaaaagca

SEQ ID NO: 3326 - DNA, 50 bp, Homo sapiens
cccccgtgggcatggaccacctttattttatacaaaattaaaaacaagtt

SEQ ID NO: 3327 - DNA, 50 bp, Homo sapiens
actgtaaactaatctgtcattgtttttaccttccttttctttttcagtgc

SEQ ID NO: 3328 - DNA, 50 bp, Homo sapiens
tacttgctgtggtggtcttgtgaaaggtgatgggttttattcgttgggct

SEQ ID NO: 3329 - DNA, 50 bp, Homo sapiens
aaagaattagtgtatgcttcctgaataaaaaggagccaaagttgatcaga

SEQ ID NO: 3330 - DNA, 50 bp, Homo sapiens; identical to SEQ ID NO: 1251

SEQ ID NO: 3331 - DNA, 50 bp, Homo sapiens
agcttaaggttttaaaaatgttgcccgtaatgttgaacgtgtctgttaga

SEQ ID NO: 3332 - DNA, 50 bp, Homo sapiens
ggatgcacgtacagaatacattcagccgtcaggtaataacatgaagcagt

SEQ ID NO: 3333 - DNA, 50 bp, Homo sapiens
ggacagtttctattgcttttccttttttccatcccttccctaccatcaaa

SEQ ID NO: 3334 - DNA, 50 bp, Homo sapiens
agacttacattactgctttaacgtgtatatcactgggcatccccaagggc

SEQ ID NO: 3335 - DNA, 50 bp, Homo sapiens
gtcaggttaggtcaaagccagggagtgacagaatctgggaaatcaaacaa

SEQ ID NO: 3336 - DNA, 50 bp, Homo sapiens
cctcttgatgcctaagcaggtaagcagatgcctaagctgtatttctccaa

SEQ ID NO: 3337 - DNA, 50 bp, Homo sapiens
tggatctgtcaaactaacacttatgcctttagtctcattgtatgaggtgt

SEQ ID NO: 3338 - DNA, 50 bp, Homo sapiens
acctgccatcattggtctttactaagtgaagtgacttctttctttaacaa

SEQ ID NO: 3339 - DNA, 50 bp, Homo sapiens
gctgccaactgtagtaatgatgcttttaataaaagtgacccatgatatgc

SEQ ID NO: 3340 - DNA, 50 bp, Homo sapiens
actgttgtccccccacccttttttccttaaataaagtaaaaatgacaccc

SEQ ID NO: 3341 - DNA, 50 bp, Homo sapiens
tgtgaatactgtgtagcaggatcttgagagtccttgttcttacataggca

SEQ ID NO: 3342 - DNA, 50 bp, Homo sapiens
aagaggcttccatccctccttccttctttcctcctacagtgctgagcaaa

SEQ ID NO: 3343 - DNA, 50 bp, Homo sapiens
gttgaattggggtggatggggggagcaagcataatttttaagtgtgaagc

SEQ ID NO: 3344 - DNA, 50 bp, Homo sapiens; identical to SEQ ID NO: 876

SEQ ID NO: 3345 - DNA, 50 bp, Homo sapiens
cccactgaagtctttgggtagctcttaagccataactaaggagcagcatt

SEQ ID NO: 3346 - DNA, 50 bp, Homo sapiens
agtgacgaggaggaagtggcctacacgggttagctgcccagtgagccatc

SEQ ID NO: 3347 - DNA, 50 bp, Homo sapiens
aacagaagtcaagagaacatagaccaacttgctgcatgagtaaggtggct

SEQ ID NO: 3348 - DNA, 50 bp, Homo sapiens
ttttccctgctattgaggaagtattttgccttccctactcactgagaagt

SEQ ID NO: 3349 - DNA, 50 bp, Homo sapiens
cggaaccagaatttgatctcaactatgttccactaaaggcacaggaatgg

SEQ ID NO: 3350 - DNA, 50 bp, Homo sapiens
cgcaccttgtgtcttgtagggtatggtatgtgggacttcgctgtttttat

SEQ ID NO: 3351 - DNA, 50 bp, Homo sapiens
agcagttatattgccccttggtttttattcagtttaactactgtttccaa

SEQ ID NO: 3352 - DNA, 50 bp, Homo sapiens
agcaaaatcctcagaaatggtctaaataaaacacttgatatgcctagaga

SEQ ID NO: 3353 - DNA, 50 bp, Homo sapiens; identical to SEQ ID NO: 879

SEQ ID NO: 3354 - DNA, 50 bp, Homo sapiens
ttacctggattccattggctggttttaccactcctatcagattgtagtgt

SEQ ID NO: 3355 - DNA, 50 bp, Homo sapiens
ctctttgccctctatcctgagtaactaatggacatcttctcatgcaaggt

SEQ ID NO: 3356 - DNA, 50 bp, Homo sapiens
gccacagaatggtcacccagcttatttaggtgtagacaagtatgacacag

SEQ ID NO: 3357 - DNA, 50 bp, Homo sapiens
gccacagaggctccaatacctgggaatgttcacaaagtcatcaactggaa

SEQ ID NO: 3358 - DNA, 50 bp, Homo sapiens
agaatgtgtgtgcctgtgggtctctacaagtgacagatgtgttgttttca

SEQ ID NO: 3359 - DNA, 50 bp, Homo sapiens
tccaaattgtttcctaacattctattttatgcctttgcgtattaaacgtg

SEQ ID NO: 3360 - DNA, 50 bp, Homo sapiens
gcctctactgtggcctcaaccctggcaattatagctactcccatccctta

SEQ ID NO: 3361 - DNA, 50 bp, Homo sapiens
aactgaacacaattttgggacaacgtttaaacattacttttcatacttga

SEQ ID NO: 3362 - DNA, 50 bp, Homo sapiens
ctcagcccagcccgcctgtccctagattcagccacatcagaaataaactg

SEQ ID NO: 3363 - DNA, 50 bp, Homo sapiens
actgtgccatggacatttttcctctggggaattaacatctaaattctggt

SEQ ID NO: 3364 - DNA, 50 bp, Homo sapiens
acaacgctcttagagaatccgtgaatgtgaacagacaaatgtggctaacc

SEQ ID NO: 3365 - DNA, 50 bp, Homo sapiens
taggagaataagagtctggagactgggagccttcacttcggcctccgatt

SEQ ID NO: 3366 - DNA, 50 bp, Homo sapiens
tgctgagtggttacactttgcaagctgtggtgaagatcacactgtgaaga

SEQ ID NO: 3367 - DNA, 50 bp, Homo sapiens
cccagtgctgatggagatgccactttcgtgtgactgcgaacattaaagca

SEQ ID NO: 3368 - DNA, 50 bp, Homo sapiens
tgttcaggatctcctcccttgtttaaatgtcaataaatgccccaactgct

SEQ ID NO: 3369 - DNA, 50 bp, Homo sapiens
ttattcatatattcctgtccaaagccacactgaaaacagaggcagagaca

SEQ ID NO: 3370 - DNA, 50 bp, Homo sapiens
aggtcatccacacacttctgcccccactgcattgaattttttgcttatgt

SEQ ID NO: 3371 - DNA, 50 bp, Homo sapiens
ttttcgttctcctcctaccccagatctctacaaggacattgcccctaagc

SEQ ID NO: 3372 - DNA, 50 bp, Homo sapiens
gtgtttgtaattcttctttgtccttttacctacagaaatggtcacatggt

SEQ ID NO: 3373 - DNA, 50 bp, Homo sapiens
aggatgtttgtagtgctataatatagaatgggatttactctgctttacca

SEQ ID NO: 3374 - DNA, 50 bp, Homo sapiens
agctaattatctctttgagtccttgcttctgtttgctcacagtaagctca

SEQ ID NO: 3375 - DNA, 50 bp, Homo sapiens
tcctacttatttaagctatttgagctccgggtctcttctacctgcattct

SEQ ID NO: 3376 - DNA, 50 bp, Homo sapiens
agtgattgccacctaaatcagaagacgttctaaagtcagtaagaaagtgt

SEQ ID NO: 3377 - DNA, 50 bp, Homo sapiens
cacgcttagggcagggatctgggaaattccagtgatctcctttagcagag

SEQ ID NO: 3378 - DNA, 50 bp, Homo sapiens
tttctaatcgaggtgtgaaaaagttctaggttcagttgaagttctgatga

SEQ ID NO: 3379 - DNA, 50 bp, Homo sapiens
tcattctgtttttgatgaacatttggaaactgtcgggctttttattaaag

SEQ ID NO: 3380 - DNA, 50 bp, Homo sapiens
caatgccctgtgttaaattgtttaaaagtttcccttttcttttttgccaa

SEQ ID NO: 3381 - DNA, 50 bp, Homo sapiens
acctattgcatggaaagatgctcattatagtgaagttaataaagcacctt

SEQ ID NO: 3382 - DNA, 50 bp, Homo sapiens
agaggactatagtggaagtgaaagcattctgtgtttactctttgcattaa

SEQ ID NO: 3383 - DNA, 50 bp, Homo sapiens
tgaattgcactgtgaaaagcactcttccctctcagttttcgttcatcctg

SEQ ID NO: 3384 - DNA, 50 bp, Homo sapiens
ccatggggtcagaagggcacggtagttcttgcaattatttttgttttacc

SEQ ID NO: 3385 - DNA, 50 bp, Homo sapiens
aatgtgggaaggatttatttacagtgtgttgtaattttgtaaggccaact

SEQ ID NO: 3386 - DNA, 50 bp, Homo sapiens
agctactgtgacagaaacagaaaagcagtggacaacacgtttccaagaag

SEQ ID NO: 3387 - DNA, 50 bp, Homo sapiens
tgctcatgctgacttaaaacactagcagtaaaacgctgtaaactgtaaca

SEQ ID NO: 3388 - DNA, 50 bp, Homo sapiens
tccaatgcagtcccattctttatggcctatagtctcactcccaactaccc

SEQ ID NO: 3389 - DNA, 50 bp, Homo sapiens
ggtgtctgacttaatgactcctgctgaagttgaattgtgagatgttatcc

SEQ ID NO: 3390 - DNA, 50 bp, Homo sapiens
catttgtctggaaatgctgccgggagcctattgtgtaaatgtaggtattt

SEQ ID NO: 3391 - DNA, 50 bp, Homo sapiens; identical to SEQ ID NO: 814

SEQ ID NO: 3392 - DNA, 50 bp, Homo sapiens
caggtcaacccccaccggacctacaacccgcagtcccacatcatctcagg

SEQ ID NO: 3393 - DNA, 50 bp, Homo sapiens; identical to SEQ ID NO: 3392

SEQ ID NO: 3394 - DNA, 50 bp, Homo sapiens
tttagggttgtgactggctttggtgcaaatgtgtgctcaagctaataagt

SEQ ID NO: 3395 - DNA, 50 bp, Homo sapiens
acttgtgttttgtttgggggctgggaaatgtatttttacattgtagccaa

SEQ ID NO: 3396 - DNA, 50 bp, Homo sapiens
aacattgtgctctaacagtatgactattctttcccccactcttaaacagt

SEQ ID NO: 3397 - DNA, 50 bp, Homo sapiens
ccaagggaggagggaggaggtaaaaggcagggagttaataacatgaatta

SEQ ID NO: 3398 - DNA, 50 bp, Homo sapiens
tactctttggcatccagtctctcgtggcgattgattatgcttgtgtgagg

SEQ ID NO: 3399 - DNA, 50 bp, Homo sapiens
ccttccagaagctacgaaaaagggagctgtttaaatttaataaatctctg

SEQ ID NO: 3400 - DNA, 50 bp, Homo sapiens
aagtgccatagaagaccaataactgtttagttgaggctagtctggaacct

SEQ ID NO: 3401 - DNA, 50 bp, Homo sapiens
tggattcaagttactgaagtgaataccaataaaaagaaaaccctaggcca

SEQ ID NO: 3402 - DNA, 50 bp, Homo sapiens
aggagtggatcccaccttcaacaccttacaagtaaagacaatgaagaaca

SEQ ID NO: 3403 - DNA, 50 bp, Homo sapiens
cagtaatagctgaacctgttcaaaatgttaataaaggtttcgttgcatgg

SEQ ID NO: 3404 - DNA, 50 bp, Homo sapiens
agggagtggggaggtggtaagaacacctgacaacttctgaatattggaca

SEQ ID NO: 3405 - DNA, 50 bp, Homo sapiens
aaaattagtggattgactccactttgttgtgttgttttcattgttgaaaa

SEQ ID NO: 3406 - DNA, 50 bp, Homo sapiens
aatggaggcacgaacgcaggggccaaatagcaataaatgggttttgtttt

SEQ ID NO: 3407 - DNA, 50 bp, Homo sapiens
tgttttgattgttttgcaaggaagaaagacaatggaataacataccttca

SEQ ID NO: 3408 - DNA, 50 bp, Homo sapiens
tcattgctgtctacaggtttctttcagattatgttcatgggtttgtgtgt

SEQ ID NO: 3409 - DNA, 50 bp, Homo sapiens
gaaaacagaccttgtgctgaggacacgtcaataaaaattataccttcccc

SEQ ID NO: 3410 - DNA, 50 bp, Homo sapiens
gggataccagctgagtctgaattctgctctaaataaagacgactacagag

SEQ ID NO: 3411 - DNA, 50 bp, Homo sapiens
tggctcggataagagatgggacatcattcagtcactagttggatggcaca

SEQ ID NO: 3412 - DNA, 50 bp, Homo sapiens
aacttgatgaaagtattgcagtattgatgccattgtagaatagaactgga

SEQ ID NO: 3413 - DNA, 50 bp, Homo sapiens
tttgtgtgttgggaccaaacagttgtcaataaactttacaagcgagcatc

SEQ ID NO: 3414 - DNA, 50 bp, Homo sapiens; identical to SEQ ID NO: 1675

SEQ ID NO: 3415 - DNA, 50 bp, Homo sapiens
aggtggtcaatgaatgttttgatgaaatgaatgtttttgtataatggcct

SEQ ID NO: 3416 - DNA, 50 bp, Homo sapiens
acgggacaattttaagatgtaataccaatactttagaagtttggtcgtgt

SEQ ID NO: 3417 - DNA, 50 bp, Homo sapiens; identical to SEQ ID NO: 612

SEQ ID NO: 3418 - DNA, 50 bp, Homo sapiens; identical to SEQ ID NO: 612

SEQ ID NO: 3419 - DNA, 50 bp, Homo sapiens
acttttatgtaaaaaagtgcacctttagttttacaagtaaagcaggttgt

SEQ ID NO: 3420 - DNA, 50 bp, Homo sapiens
tcttaataataatgaagacgacttaccctgtggaattgaacacactggtg

SEQ ID NO: 3421 - DNA, 50 bp, Homo sapiens
gctgctgtgtgtatttatgaatattaatgaataaaaactgcttggatggt

SEQ ID NO: 3422 - DNA, 50 bp, Homo sapiens; identical to SEQ ID NO: 812

SEQ ID NO: 3423 - DNA, 50 bp, Homo sapiens
taaatttatttatttatgaaaaaacctcgtgccgaattcttggcctcgag

SEQ ID NO: 3424 - DNA, 50 bp, Homo sapiens
gggtttccgctggctctcccagtatattgactgatgtttggacggtgaaa

SEQ ID NO: 3425 - DNA, 50 bp, Homo sapiens
gtacagttactcatgtcattgtaatgatttcactcctaactgtgacattt

SEQ ID NO: 3426 - DNA, 50 bp, Homo sapiens
actgagttgtcagaaattatgtcaaaatgaaaactgtttgtttcatgaca

SEQ ID NO: 3427 - DNA, 50 bp, Homo sapiens
acctgacttcaccatgtttattccctttgcctacaaccagttaatatctg

SEQ ID NO: 3428 - DNA, 50 bp, Homo sapiens
tcatgcgtgaacaatttaaaaaacgacagaataaggtacaaatgtagtgt

SEQ ID NO: 3429 - DNA, 50 bp, Homo sapiens
cccatcccccctccccacccccatccccaatacagctacgtttgtacatc

SEQ ID NO: 3430 - DNA, 50 bp, Homo sapiens
ccaacaaaattgggatcatccaaactgagtccatctggctaattctaaat

SEQ ID NO: 3431 - DNA, 50 bp, Homo sapiens
tgactggaactgagagtaaattgggaatgtatgaccaatcttagaccctg

SEQ ID NO: 3432 - DNA, 50 bp, Homo sapiens
tgtttaaatgatggtgaatactttcttaacactggtttgtctgcatgtgt

SEQ ID NO: 3433 - DNA, 50 bp, Homo sapiens
acctaaggtcaagctgggagagagaaatgactgagatgaatgtctttact

SEQ ID NO: 3434 - DNA, 50 bp, Homo sapiens
gcttagggaaatttcacagttcattgtggagtgttaaacttagaacatgt

SEQ ID NO: 3435 - DNA, 50 bp, Homo sapiens
tgttacaggtttccaaggtggacttgaacagatggccttatattaccaaa

SEQ ID NO: 3436 - DNA, 50 bp, Homo sapiens
tgttactgctttgccagttctacgttatttacaattattcagctcttgca

SEQ ID NO: 3437 - DNA, 50 bp, Homo sapiens
tttctgtattgcagtgtttataggcttcttgtgtgttaaacttgatttca

SEQ ID NO: 3438 - DNA, 50 bp, Homo sapiens; identical to SEQ ID NO: 860

SEQ ID NO: 3439 - DNA, 50 bp, Homo sapiens
gtttgtgttaccctcctgtaaatggtgtacataatgtattgttggtaatt

SEQ ID NO: 3440 - DNA, 50 bp, Homo sapiens
gctcaccatacggctctaacagattaggggctaaaacgattactgacttt

SEQ ID NO: 3441 - DNA, 50 bp, Homo sapiens
cggctgatgggacaggaattgaagaagagaattgactcgtatgaacagga

SEQ ID NO: 3442 - DNA, 50 bp, Homo sapiens
tggtgctacgaagccatttctcttgatttttagtaaacttttatgacagc

SEQ ID NO: 3443 - DNA, 50 bp, Homo sapiens
tgagaaactgtttgacctggttcgaagaatgttagaatatgatccaactc

SEQ ID NO: 3444 - DNA, 50 bp, Homo sapiens
ggtgggacacgccaagctcttcagtgaagacacgatgttattaaaagcct

SEQ ID NO: 3445 - DNA, 50 bp, Homo sapiens
tgctttgaagctacctggatatttcctatttgaaataaaattgttcggtc

SEQ ID NO: 3446 - DNA, 50 bp, Homo sapiens
atcgccaagaacctggttagaggcataaagaccttttttcaccgttacct

SEQ ID NO: 3447 - DNA, 50 bp, Homo sapiens
tgctgcgacgcacatacatacgtgttgtgtctgtcaataaagtgtaaata

SEQ ID NO: 3448 - DNA, 50 bp, Homo sapiens
tgggaggagataagaagagaaagggccaagtgatccagttctaagtgtca

SEQ ID NO: 3449 - DNA, 50 bp, Homo sapiens
tgcagtagttgactttgctgtatggaaaaataaagtgaaattgccctaat

SEQ ID NO: 3450 - DNA, 50 bp, Homo sapiens
gctaaataaggaatactcatgccaagatcatcgaattgtgcctcctccct

SEQ ID NO: 3451 - DNA, 50 bp, Homo sapiens; identical to SEQ ID NO: 1780

SEQ ID NO: 3452 - DNA, 50 bp, Homo sapiens
ggagtcagtcagtgctcctatatttttcattttttgtcaaagcaagaagt

SEQ ID NO: 3453 - DNA, 50 bp, Homo sapiens
tttgtggccgagtgtaacaaccatataataaatcacctcttccgctgttt

SEQ ID NO: 3454 - DNA, 50 bp, Homo sapiens
ttctacatgaaatgtttagctcttacactctatccttcctagaaaatggt

SEQ ID NO: 3455 - DNA, 50 bp, Homo sapiens
ggacgacagtgaaatctagagtaaaaccaagctggcccaagtgtcctgca

SEQ ID NO: 3456 - DNA, 50 bp, Homo sapiens
tgttttggggtctgtgagagtacatgtattatatacaagcacaacagggc

SEQ ID NO: 3457 - DNA, 50 bp, Homo sapiens
aggaacagttagttctcatctagaatgaaagttccatatatgcattggtg

SEQ ID NO: 3458 - DNA, 50 bp, Homo sapiens
tgtgtgtgtatcccataccccactctggaaggaaccatccagtaaaggtc

SEQ ID NO: 3459 - DNA, 50 bp, Homo sapiens
gtgcaaggggagcacatattggatgtatatgttaccatatgttaggaaat

SEQ ID NO: 3460 - DNA, 50 bp, Homo sapiens; identical to SEQ ID NO: 293

SEQ ID NO: 3461 - DNA, 50 bp, Homo sapiens
acccagtcacctctgtcttcagcaccctcataagtcgtcactaatacaca

SEQ ID NO: 3462 - DNA, 50 bp, Homo sapiens
tgaatcacattgtcagaattttttcctcctcgctgttcaattttgtagtt

SEQ ID NO: 3463 - DNA, 50 bp, Homo sapiens
agatgccttgttgctttgaagaagggagtgatgtcaattctcttgttaca

SEQ ID NO: 3464 - DNA, 50 bp, Homo sapiens; identical to SEQ ID NO: 649

SEQ ID NO: 3465 - DNA, 50 bp, Homo sapiens
aaaagttctctgtagatttctgaagtgcatattcattgatgccaagaaaa

SEQ ID NO: 3466 - DNA, 50 bp, Homo sapiens
ggaggagtttgcatgtctcatgataaccaaatgtaagatgaaaataaaag

SEQ ID NO: 3467 - DNA, 50 bp, Homo sapiens
ttggtgacttagtgattttgtcattttttacatcaacttcatggtcttgt

SEQ ID NO: 3468 - DNA, 50 bp, Homo sapiens
cgcccggcagcccccatccatctgtgtctgtctgttggcctgtatctgtt

SEQ ID NO: 3469 - DNA, 50 bp, Homo sapiens
ggcatcgccaacgcctgcctcgtgccacctcatgcttataataaagccgg

SEQ ID NO: 3470 - DNA, 50 bp, Homo sapiens; identical to SEQ ID NO: 3210

SEQ ID NO: 3471 - DNA, 50 bp, Homo sapiens
gccgtcctcagttacctttcatgaggcttctagccaaagatgataaaggg

SEQ ID NO: 3472 - DNA, 50 bp, Homo sapiens
aggataaaatcattgtctctggaggcaatttggaaattatttctgcttct

SEQ ID NO: 3473 - DNA, 50 bp, Homo sapiens
cgggtgattacaggcaccagtgcagtgatgattgtacttatttgacacat

SEQ ID NO: 3474 - DNA, 50 bp, Homo sapiens
gcctctggtgctttgtcctgtatttggtttaatgtttttgtcctaatctc

SEQ ID NO: 3475 - DNA, 50 bp, Homo sapiens
ttgatgtgaattcagttattgaacttgttacttgtttttgccagaaatgt

SEQ ID NO: 3476 - DNA, 50 bp, Homo sapiens
aagcttcgaactcaaaatcatggaaaggttttaagatttgaggttggttt

SEQ ID NO: 3477 - DNA, 50 bp, Homo sapiens
cccagttagatatcagtgagtttgaataactgaagaaatgttgacaatgt

SEQ ID NO: 3478 - DNA, 50 bp, Homo sapiens
aagtacacctgtcagctgtttcttaccacttcgatggttgtgattaattt

SEQ ID NO: 3479 - DNA, 50 bp, Homo sapiens
tgtttgcttgaacagttgtgtaaatcatacaggattttgtgggtattggt

SEQ ID NO: 3480 - DNA, 50 bp, Homo sapiens
tgaccttctgtgtttttgtttctgacttgaataatttatcaatggtgttg

SEQ ID NO: 3481 - DNA, 50 bp, Homo sapiens
ccagggctgctttgctgtgatgatgattgcatttcaacacatgccagatg

SEQ ID NO: 3482 - DNA, 50 bp, Homo sapiens
gagttaccacaccccatgagggaagctctaaatagccaacacccatctgt

SEQ ID NO: 3483 - DNA, 50 bp, Homo sapiens
ttctatccttgacttagattctggtggagagaagtgagaataggcagccc

SEQ ID NO: 3484 - DNA, 50 bp, Homo sapiens
tcttgctctttctactctgaactaataaagctgttgccaagctggacggc

SEQ ID NO: 3485 - DNA, 50 bp, Homo sapiens
tgcaaacaaatgcataaatgcaaatgtaaagtaaagctgaaattgatctc

SEQ ID NO: 3486 - DNA, 50 bp, Homo sapiens; identical to SEQ ID NO: 1727

SEQ ID NO: 3487 - DNA, 50 bp, Homo sapiens
tgcaatggaatataaatatcacaaagttgtttaactagactgcgtgttgt

SEQ ID NO: 3488 - DNA, 50 bp, Homo sapiens
tttcacctcctcagtcccttgcctaccccagtgagagtctgatcttgttt

SEQ ID NO: 3489 - DNA, 50 bp, Homo sapiens
cgcctctccccgtggaccctgttaatcccaataaaattctgagcaagttc

SEQ ID NO: 3490 - DNA, 50 bp, Homo sapiens
aggattcgctgttgaaacaagttgtccaagcaatgttatattcattttta

SEQ ID NO: 3491 - DNA, 50 bp, Homo sapiens
ggaagggggacaagggtcagtctgtcgggtgggggcagaaatcaaatcag

SEQ ID NO: 3492 - DNA, 50 bp, Homo sapiens; identical to SEQ ID NO: 3491

SEQ ID NO: 3493 - DNA, 50 bp, Homo sapiens
tttttcccagctcgccacagaatggatcatgaagactgacaactgcaaaa

SEQ ID NO: 3494 - DNA, 50 bp, Homo sapiens
aggagtggcctaagaaatgcgtgtttcagtgactagattataaatattct

SEQ ID NO: 3495 - DNA, 50 bp, Homo sapiens
agctgtgaacttcgtaactttgtaaagcaagatataaagcaaatacaaga

SEQ ID NO: 3496 - DNA, 50 bp, Homo sapiens
aggagggatcacctgcactgagaatgaggcagtttgacacagatcacaaa

SEQ ID NO: 3497 - DNA, 50 bp, Homo sapiens
tgttccactaccagccttacttgtttaataaaaatcagtgcaaagagaaa

SEQ ID NO: 3498 - DNA, 50 bp, Homo sapiens
acctcagattttgttacctgtcttttaaaaatgcagattttgtcaaatca

SEQ ID NO: 3499 - DNA, 50 bp, Homo sapiens
ttaacggcttcactggacagttttccttagaaggtagttttgtgtgactg

SEQ ID NO: 3500 - DNA, 50 bp, Homo sapiens
accgtgggtgtgtccaagaagaaataagtctgtaggccttgtctgttaat

SEQ ID NO: 3501 - DNA, 50 bp, Homo sapiens
ccaatggatatttctgtattactagggaggcatttacagtcctctaatgt

SEQ ID NO: 3502 - DNA, 50 bp, Homo sapiens
tagctttagaaaataacagtttgtgaacttacttccctatatttgcagct

SEQ ID NO: 3503 - DNA, 50 bp, Homo sapiens
ctttgtggactagccaaggctgtgagggccagaataaacaactgctcaac

SEQ ID NO: 3504 - DNA, 50 bp, Homo sapiens
gccgagcaatgacccttttcaatttcttatttctgtgttactgaggaccc

SEQ ID NO: 3505 - DNA, 50 bp, Homo sapiens
gaaacatgtggatttgctgtggaatgacaagcttcaaggatttacccagg

SEQ ID NO: 3506 - DNA, 50 bp, Homo sapiens
tttgatctgaaatgtttgagaagacacgaataaagttacttgggcagaaa

SEQ ID NO: 3507 - DNA, 50 bp, Homo sapiens
tcccatcaaaaaggtatcaaatgccttggaagctccctgatcctacaaaa

SEQ ID NO: 3508 - DNA, 50 bp, Homo sapiens
atctgacattattgtaactaccgtgtgatcagtaagattcctgtaagaaa

SEQ ID NO: 3509 - DNA, 50 bp, Homo sapiens
accttgtaccatggaaaacatgaaaagagtcttagaagtaaagaacaaca

SEQ ID NO: 3510 - DNA, 50 bp, Homo sapiens
agcatgtgtctgccatttcatttgtacgcttgttcaaaaccaagtttgtt

SEQ ID NO: 3511 - DNA, 50 bp, Homo sapiens
tgagctgtattaccataagtagaattttaagtaaactggtgaatttgggc

SEQ ID NO: 3512 - DNA, 50 bp, Homo sapiens
gccccattaaagggtgaacttgtaataaattggaatttcaaataaacctc

SEQ ID NO: 3513 - DNA, 50 bp, Homo sapiens; identical to SEQ ID NO: 991

SEQ ID NO: 3514 - DNA, 50 bp, Homo sapiens
aacgtcatgtgcacctttacactgtggttagtgtaataaaacatgttcct

SEQ ID NO: 3515 - DNA, 50 bp, Homo sapiens; identical to SEQ ID NO: 3369

SEQ ID NO: 3516 - DNA, 50 bp, Homo sapiens
gcagccacccactgggagtcttgtttttatttataataaaattgttgggg

SEQ ID NO: 3517 - DNA, 50 bp, Homo sapiens
atccaccaaaaattaggtcatcatagttgaggtatgtgtctgctatttgc

SEQ ID NO: 3518 - DNA, 50 bp, Homo sapiens
ccattggctggaacatggattggggatttgatagaaaaataaaccctgct

SEQ ID NO: 3519 - DNA, 50 bp, Homo sapiens
gttccttactctgtccttgatggaggggagaagggagggcaaagaagtta

SEQ ID NO: 3520 - DNA, 50 bp, Homo sapiens
tggttttcctttggggacgtggttaacggtccagaagaatcccttctaga

SEQ ID NO: 3521 - DNA, 50 bp, Homo sapiens
acccctttcactcttggctttcttatgttgctttcatgaatggaatggaa

SEQ ID NO: 3522 - DNA, 50 bp, Homo sapiens
cccatcctcatcccccacactgggatagatgcttgtttgtaaaaactcac

SEQ ID NO: 3523 - DNA, 50 bp, Homo sapiens
tcaggccgcctagctgcccctttgccaggttaataaagcactgacttgtt

SEQ ID NO: 3524 - DNA, 50 bp, Homo sapiens
aaggattttaaataactgccgacttcaaaagtgttcttaaaacgaaagat

SEQ ID NO: 3525 - DNA, 50 bp, Homo sapiens
cacccaccctccccccaatcagtgttcttatttcagtgacaataaaccat

SEQ ID NO: 3526 - DNA, 50 bp, Homo sapiens
atagctggtgacaaacagatggttgctcagggacaaggtgccttccaatg

SEQ ID NO: 3527 - DNA, 50 bp, Homo sapiens; identical to SEQ ID NO: 922

SEQ ID NO: 3528 - DNA, 50 bp, Homo sapiens; identical to SEQ ID NO: 1047

SEQ ID NO: 3529 - DNA, 50 bp, Homo sapiens; identical to SEQ ID NO: 1104

SEQ ID NO: 3530 - DNA, 50 bp, Homo sapiens
gctgctgtgtgtggtctcagaggctctgcttccttaggttacaaaacaaa

SEQ ID NO: 3531 - DNA, 50 bp, Homo sapiens; identical to SEQ ID NO: 817

SEQ ID NO: 3532 - DNA, 50 bp, Homo sapiens
ccccacaatggtctcttttctccctgctcccttattaaagaactctttct

SEQ ID NO: 3533 - DNA, 50 bp, Homo sapiens
cagtggttcccattgattctccccatatctttttgctctcaggctctggc

SEQ ID NO: 3534 - DNA, 50 bp, Homo sapiens
cttgtatctctaaatatggtgtgatatgaaccagtccattcacattggaa

SEQ ID NO: 3535 - DNA, 50 bp, Homo sapiens
acatagattttctgccaacaaatcctctctgctgttcacattatcctttg

SEQ ID NO: 3536 - DNA, 50 bp, Homo sapiens; identical to SEQ ID NO: 1484

SEQ ID NO: 3537 - DNA, 50 bp, Homo sapiens
ttagaaccaaagttattcttaataaaaatcaccacatgcttggaccatgc

SEQ ID NO: 3538 - DNA, 50 bp, Homo sapiens
gctcttacacttcgtctttaatgttctttttggagttaggacctctcagt

SEQ ID NO: 3539 - DNA, 50 bp, Homo sapiens
accttgacatgggttgtctaataaaactcggacccttcttgtgaaatcaa

SEQ ID NO: 3540 - DNA, 50 bp, Homo sapiens
atcccagtgcacagtgagttgtatatcacaaataggaggccacttcagga

SEQ ID NO: 3541 - DNA, 50 bp, Homo sapiens
gaagctgctaggggaaggactggcctggctccagaatgttgttgcctttt

SEQ ID NO: 3542 - DNA, 50 bp, Homo sapiens
gggaaggaaaaggggtgtggcagctgggagcgtttatttatgttctttct

SEQ ID NO: 3543 - DNA, 50 bp, Homo sapiens
gagtggtgttcccagtgtggctcccagagctttgaccagattgtgatccc

SEQ ID NO: 3544 - DNA, 50 bp, Homo sapiens
ctttgcatttagggacacagcccggagccgcagaaggtcagcagggagca

SEQ ID NO: 3545 - DNA, 50 bp, Homo sapiens
cattgcctactttaacacctgtcagagaaacgtgatatggggtaaggagg

SEQ ID NO: 3546 - DNA, 50 bp, Homo sapiens
gcaatctgggagcagcacattgttgatggagtccaagtgagcacatttca

SEQ ID NO: 3547 - DNA, 50 bp, Homo sapiens
ctctcctggactgttgcagttgggtgtggctgatttgaaattgtgcttca

SEQ ID NO: 3548 - DNA, 50 bp, Homo sapiens
taacaagaattgcattgaggaaacaaggctccacagggccaatcttctgg

SEQ ID NO: 3549 - DNA, 50 bp, Homo sapiens
aagaagttacatcttcaatgtccagggatgatcgtttgaagagaacctct

SEQ ID NO: 3550 - DNA, 50 bp, Homo sapiens
aaaacattgccagaccatttagtcctcttggaagggcctctccggtgggg

SEQ ID NO: 3551 - DNA, 50 bp, Homo sapiens
agggataataaggttagctgttaaccaagcaactgagcttttaaccaaag

SEQ ID NO: 3552 - DNA, 50 bp, Homo sapiens
caagacactgtggacttggtcaccagctcctcccttgttctctaagttcc

SEQ ID NO: 3553 - DNA, 50 bp, Homo sapiens
tctttgacggggttttccttgctcctgccaggattaaaagtccatgagtt

SEQ ID NO: 3554 - DNA, 50 bp, Homo sapiens
cttaaagtatatgttttcaaattgccattgctactattgcttgtcggtgt

SEQ ID NO: 3555 - DNA, 50 bp, Homo sapiens
ctcctgtcaccggccttgtgacattcactcagagaagaccacaccaagga

SEQ ID NO: 3556 - DNA, 50 bp, Homo sapiens
gtcggactatgtaattgtaactatacctctggttcccattaaaagtgacc

SEQ ID NO: 3557 - DNA, 50 bp, Homo sapiens
gctagtgtttgaatatgctctcttgttgctctaattctgtgcctccgtgc

SEQ ID NO: 3558 - DNA, 50 bp, Homo sapiens
agaggaacttgaaaccttgaaagacatttgttctcccaaaactgattact

SEQ ID NO: 3559 - DNA, 50 bp, Homo sapiens
actgggatattgcccacatgatcagtggctttgaatgaaatacagatgca

SEQ ID NO: 3560 - DNA, 50 bp, Homo sapiens; identical to SEQ ID NO: 2932

SEQ ID NO: 3561 - DNA, 50 bp, Homo sapiens
tttcttaggacaccatttgggctagtttctgtgtaagtgtaaatactaca

SEQ ID NO: 3562 - DNA, 50 bp, Homo sapiens; identical to SEQ ID NO: 2488

SEQ ID NO: 3563 - DNA, 50 bp, Homo sapiens
ttaacaccccacacccacccctcagttgggacaaataaaggattctcatg

SEQ ID NO: 3564 - DNA, 50 bp, Homo sapiens
caagccgccacatgcccacaacctcaccagagggagaattatgtttctaa

SEQ ID NO: 3565 - DNA, 50 bp, Homo sapiens
gtgtattgatccaagtagtcaaagtgtcttaaagggcacctatttgtcct

SEQ ID NO: 3566 - DNA, 50 bp, Homo sapiens
agtgctttccaaatgtgattgttctgggtgatgggacatatgggcagttg

SEQ ID NO: 3567 - DNA, 50 bp, Homo sapiens
cgggggaataggaggaaaaacatggcatggaacaaaccaacataaaaggt

SEQ ID NO: 3568 - DNA, 50 bp, Homo sapiens
actaattctgctctttggacaagtgcctgacatctgcttcattgggtttt

SEQ ID NO: 3569 - DNA, 50 bp, Homo sapiens
aggaataaagttaagtatttcccacttggaaattgtaccactcctggggt

SEQ ID NO: 3570 - DNA, 50 bp, Homo sapiens; identical to SEQ ID NO: 2144

SEQ ID NO: 3571 - DNA, 50 bp, Homo sapiens
gtctggtaagccgatgctaatggcagaagcaatagaagtccaaggcacta

SEQ ID NO: 3572 - DNA, 50 bp, Homo sapiens; identical to SEQ ID NO: 3416

SEQ ID NO: 3573 - DNA, 50 bp, Homo sapiens
ctctcagttcccaagatggccccacattcccattgttttccccaagagaa

SEQ ID NO: 3574 - DNA, 50 bp, Homo sapiens
ggttgttgtattgtaccagtgaaatgccaaatttgaaaggcctgtactgc

SEQ ID NO: 3575 - DNA, 50 bp, Homo sapiens
ttgtttgccatctgttgatcaggaactacttcagctacttgcatttgatt

SEQ ID NO: 3576 - DNA, 50 bp, Homo sapiens; identical to SEQ ID NO: 2966

SEQ ID NO: 3577 - DNA, 50 bp, Homo sapiens
acagagagcacccaggaggtacacatactaaagtgacacaaagagaatga

SEQ ID NO: 3578 - DNA, 50 bp, Homo sapiens; identical to SEQ ID NO: 1887

SEQ ID NO: 3579 - DNA, 50 bp, Homo sapiens
agcatgttgtttaatttctttttaaaaatcactgttgggctttgaaagca

SEQ ID NO: 3580 - DNA, 50 bp, Homo sapiens
gctgacaaaacctgggaatttgggttgtgtatgcgaatgtttcagtgcct

SEQ ID NO: 3581 - DNA, 50 bp, Homo sapiens
tcactttccaaatgcctgttttgtgctttacaataaatgatatgaaacct

SEQ ID NO: 3582 - DNA, 50 bp, Homo sapiens
tttatgcgtatttaagccttggaaacacagggactatcttgtggattggg

SEQ ID NO: 3583 - DNA, 50 bp, Homo sapiens; identical to SEQ ID NO: 2782

SEQ ID NO: 3584 - DNA, 50 bp, Homo sapiens
acatccagtgtctccaaaattgtttccttgtactgatataaacacttcca

SEQ ID NO: 3585 - DNA, 50 bp, Homo sapiens
ggtacagttggagcactatatgtactctctggactactttggacagaagt

SEQ ID NO: 3586 - DNA, 50 bp, Homo sapiens
aaaatcacctcaacagccctgtgaagtgacctcagtgagatatttggatc

SEQ ID NO: 3587 - DNA, 50 bp, Homo sapiens
ttaaagtgcaccttccaaaatgtctcccataagtaggtaagaccaacctg

SEQ ID NO: 3588 - DNA, 50 bp, Homo sapiens
aatgatgagtgtgtggctacatacaaaggagttccctttgaggtgaaagg

SEQ ID NO: 3589 - DNA, 50 bp, Homo sapiens; identical to SEQ ID NO: 2872

SEQ ID NO: 3590 - DNA, 50 bp, Homo sapiens; identical to SEQ ID NO: 2749

SEQ ID NO: 3591 - DNA, 50 bp, Homo sapiens
ttgtccacaagtaaaaggaaatcctcctccagggagtctcagcttcaccc

SEQ ID NO: 3592 - DNA, 50 bp, Homo sapiens
cattgctctttagtgtgtgttaacctgtggtttgaaagaaatgctcttgt

SEQ ID NO: 3593 - DNA, 50 bp, Homo sapiens
gtctggcttaactatttttgaaaatataactgtttcccctctctgctgct

SEQ ID NO: 3594 - DNA, 50 bp, Homo sapiens
aaaagcaattacccttaaaactgtactctggcctacttttctattttgca

SEQ ID NO: 3595 - DNA, 50 bp, Homo sapiens
ggctctcagtgtgccatagaggacagcaactggtgattgtttcagagaaa

SEQ ID NO: 3596 - DNA, 50 bp, Homo sapiens
aaactgtttctttggtgtcctttacattgaaataaattgtgtttgtgcct

SEQ ID NO: 3597 - DNA, 50 bp, Homo sapiens; identical to SEQ ID NO: 2640

SEQ ID NO: 3598 - DNA, 50 bp, Homo sapiens
agagagggaacatcaaatgctggcactatatacatacgatcagcctgatt

SEQ ID NO: 3599 - DNA, 50 bp, Homo sapiens
gtcttccgagaaacttttctgatcagtttgcgagttttgatgagttttgt

SEQ ID NO: 3600 - DNA, 50 bp, Homo sapiens
gctgctgttgctgctttgtgatgacgtgagatcaataagaagaacctagt

SEQ ID NO: 3601 - DNA, 50 bp, Homo sapiens
aggactgaactgaacccctccccatgaacacaagggttttatcctttcct

SEQ ID NO: 3602 - DNA, 50 bp, Homo sapiens
gatgtggtaactgttaaattgctgtgtatctgatagctctttggcagtct

SEQ ID NO: 3603 - DNA, 50 bp, Homo sapiens
gatcaaaagggctatgggaagggcagaccccgccaatgatttctcttcac

SEQ ID NO: 3604 - DNA, 50 bp, Homo sapiens
gaacagctttgtgctccggctttccctcagggaacagcagagagcagttg

SEQ ID NO: 3605 - DNA, 50 bp, Homo sapiens
tccagggaccaacattaacacaaccaatcaacacatcatgttacagaact

SEQ ID NO: 3606 - DNA, 50 bp, Homo sapiens
tattaaaggcttttggcagcaaagtgtcagtgttggcagcgaagtgtcag

SEQ ID NO: 3607 - DNA, 50 bp, Homo sapiens
ttcacaagatgctttgaaggttctgattttcaactgatcaaactaatgca

SEQ ID NO: 3608 - DNA, 50 bp, Homo sapiens; identical to SEQ ID NO: 1944

SEQ ID NO: 3609 - DNA, 50 bp, Homo sapiens; identical to SEQ ID NO: 2738

SEQ ID NO: 3610 - DNA, 50 bp, Homo sapiens
ctgtgtctggcaccacccacacatccatgtctccctcacaacccaggagg

SEQ ID NO: 3611 - DNA, 50 bp, Homo sapiens
catgtatgtaggtgcctgggagtgtgtgtggtccttgctctggccctttc

SEQ ID NO: 3612 - DNA, 50 bp, Homo sapiens; identical to SEQ ID NO: 2263

SEQ ID NO: 3613 - DNA, 50 bp, Homo sapiens
tcttcggaaagaagaaggtgggaggatgtgaattgttagtttctgagttt

SEQ ID NO: 3614 - DNA, 50 bp, Homo sapiens
atcaagcctctgtgcctcagtttctctctcaggataaagagtgaatagag

SEQ ID NO: 3615 - DNA, 50 bp, Homo sapiens
gcgatagaggaaatctactccctatcttgggtccttgaactacagcctgc

SEQ ID NO: 3616 - DNA, 50 bp, Homo sapiens
ctagggagccgcaccttgtcatgtaccatcaataaagtaccctgtgctca

SEQ ID NO: 3617 - DNA, 50 bp, Homo sapiens
tttctccccctagtttgtgagaaacatctcaataaagtgctttccaaaaa

SEQ ID NO: 3618 - DNA, 50 bp, Homo sapiens; identical to SEQ ID NO: 3507

SEQ ID NO: 3619 - DNA, 50 bp, Homo sapiens
tgccaaaagtttgccatgtgccttaaacatattactatatattttcccct

SEQ ID NO: 3620 - DNA, 50 bp, Homo sapiens; identical to SEQ ID NO: 2975

SEQ ID NO: 3621 - DNA, 50 bp, Homo sapiens
ttaccaagaaggacttaagggagtaaggggcgcagattagcattgctcaa

SEQ ID NO: 3622 - DNA, 50 bp, Homo sapiens
gatatgcacatcaaagcctttaccagtatcttcctgtattccgtatcaga

SEQ ID NO: 3623 - DNA, 50 bp, Homo sapiens
ctctgaggcgtgaggactcgcagtcaggggcagctgaccatggaagattg

SEQ ID NO: 3624 - DNA, 50 bp, Homo sapiens
cctctcttcctccctggaatcttgtaaaggtcctggcaaagatgatcagt

SEQ ID NO: 3625 - DNA, 50 bp, Homo sapiens
gcctcctggtctcttcaccactgtagttctctcatttccaaaccatcagc

SEQ ID NO: 3626 - DNA, 50 bp, Homo sapiens
ttttccttctaacacttgtatttggaggctcttctgtgattttgagaagt

SEQ ID NO: 3627 - DNA, 50 bp, Homo sapiens; identical to SEQ ID NO: 2578

SEQ ID NO: 3628 - DNA, 50 bp, Homo sapiens
ggacatccactagagatgggtttgaggattttccaagcgtgtaataatga

SEQ ID NO: 3629 - DNA, 50 bp, Homo sapiens
ttgcacgcagagcctttaagtgactaaggaacaacatagatagtgagcat

SEQ ID NO: 3630 - DNA, 50 bp, Homo sapiens
actttaatctgatcttgtgtcttagagaagcccccatacctggtagagca

SEQ ID NO: 3631 - DNA, 50 bp, Homo sapiens
tgtaggaaaggatgcttcacaaactgaggtagataatgctatgctgtcgt

SEQ ID NO: 3632 - DNA, 50 bp, Homo sapiens; identical to SEQ ID NO: 3631

SEQ ID NO: 3633 - DNA, 50 bp, Homo sapiens
ctggggagaggctgaggacaaatacctgctgtcactccagaggacatttt

SEQ ID NO: 3634 - DNA, 50 bp, Homo sapiens
cattacttgtgagctgctgaacaaacaagtcaaggtgagcccggacatgg

SEQ ID NO: 3635 - DNA, 50 bp, Homo sapiens; identical to SEQ ID NO: 2547

SEQ ID NO: 3636 - DNA, 50 bp, Homo sapiens
gaaacttgctacagacttacccgtaatatttgtcaagatcatagctgact

SEQ ID NO: 3637 - DNA, 50 bp, Homo sapiens; identical to SEQ ID NO: 47

SEQ ID NO: 3638 - DNA, 50 bp, Homo sapiens
tgctaaatatgttattgtggaaagatgaatgcaatagtaggactgctgac

SEQ ID NO: 3639 - DNA, 50 bp, Homo sapiens; identical to SEQ ID NO: 2914

SEQ ID NO: 3640 - DNA, 50 bp, Homo sapiens
tcctcttttctttcaagaactatatataaatgacctgttttcacgcggcc

SEQ ID NO: 3641 - DNA, 50 bp, Homo sapiens
agctgcaaagtgttttgtaccagtgaatttttgcaataatgcagtatggt

SEQ ID NO: 3642 - DNA, 50 bp, Homo sapiens; identical to SEQ ID NO: 2661

SEQ ID NO: 3643 - DNA, 50 bp, Homo sapiens
acatagtgaaagtttataagaggatgaagtgatatggtgagcagcggact

SEQ ID NO: 3644 - DNA, 50 bp, Homo sapiens
aacagcctttctggctgaccacatggttaaatgcataccttcccagtact

SEQ ID NO: 3645 - DNA, 50 bp, Homo sapiens
tgtgcctcacctggacttgtccaattaatgaagttgattcatattgcatc

SEQ ID NO: 3646 - DNA, 50 bp, Homo sapiens
ctatagatgaagacataaaagacactggtaaacaccaatgtaaaagggcc

SEQ ID NO: 3647 - DNA, 50 bp, Homo sapiens; identical to SEQ ID NO: 2915

SEQ ID NO: 3648 - DNA, 50 bp, Homo sapiens; identical to SEQ ID NO: 2750

SEQ ID NO: 3649 - DNA, 50 bp, Homo sapiens
gattcttgctgtagcgtggatagctgtgattggtgagtcaaccgtctgtg

SEQ ID NO: 3650 - DNA, 50 bp, Homo sapiens
tgggcattttaaagccatctcaagaggcatcttctacatgttttgtacgc

SEQ ID NO: 3651 - DNA, 50 bp, Homo sapiens
aagtcagggaccacttgctgaagcacgaagagcccttgtggcaatgttaa

SEQ ID NO: 3652 - DNA, 50 bp, Homo sapiens
gactgctggaagatgatctttctgcactgagactgtggagtttggggaag

SEQ ID NO: 3653 - DNA, 50 bp, Homo sapiens; identical to SEQ ID NO: 2117

SEQ ID NO: 3654 - DNA, 50 bp, Homo sapiens
aattccagctgagcgccggtcgctaccattaccgttggtcttggtgtcaa

SEQ ID NO: 3655 - DNA, 50 bp, Homo sapiens
ccccaaccctcaaattaaaactagaactatagatccacatgaacgcacgc

SEQ ID NO: 3656 - DNA, 50 bp, Homo sapiens
agcttttgaaataaaatttaaaaaccccaagcctgggtgagtgtgggaaa

SEQ ID NO: 3657 - DNA, 50 bp, Homo sapiens; identical to SEQ ID NO: 2700

SEQ ID NO: 3658 - DNA, 50 bp, Homo sapiens; identical to SEQ ID NO: 2844

SEQ ID NO: 3659 - DNA, 50 bp, Homo sapiens; identical to SEQ ID NO: 2981

SEQ ID NO: 3660 - DNA, 50 bp, Homo sapiens; identical to SEQ ID NO: 2511

SEQ ID NO: 3661 - DNA, 50 bp, Homo sapiens
gaattttcagtttgtgcttacattttctaacattggatgtttgctttggc

SEQ ID NO: 3662 - DNA, 50 bp, Homo sapiens
tatgactttaagagcccacattaggttttatgattcatttgccaggtttt

SEQ ID NO: 3663 - DNA, 50 bp, Homo sapiens
ggcgtgccgttgagggggaaaacgaagcccagtatttgctactgtttttc

SEQ ID NO: 3664 - DNA, 50 bp, Homo sapiens
ctcttgggcataaaatctcagaggaagctacttaggacatcatcttggcc

SEQ ID NO: 3665 - DNA, 50 bp, Homo sapiens
tctacagtagcctgtgctgaactgatctcttaaataaacttgcttctggt

SEQ ID NO: 3666 - DNA, 50 bp, Homo sapiens
ttctcaagtttgatactgagttgactgttcccttatccctcaccgttccc

SEQ ID NO: 3667 - DNA, 50 bp, Homo sapiens
agacttttccaaccctcatcaccaacgtctgtgccattttgtattttact

SEQ ID NO: 3668 - DNA, 50 bp, Homo sapiens
ccagcggcatctttccttgtcgaatgatactgtaatgaccttccaaagtg

SEQ ID NO: 3669 - DNA, 50 bp, Homo sapiens; identical to SEQ ID NO: 163

SEQ ID NO: 3670 - DNA, 50 bp, Homo sapiens
tgtgggttgagaccagcactctgtgaaaccttgaaatgagaagtaaaggc

SEQ ID NO: 3671 - DNA, 50 bp, Homo sapiens
tgaatacaaagaaccaagaaaaaggaatgaagactcgcaatttcacgaca

SEQ ID NO: 3672 - DNA, 50 bp, Homo sapiens
ctgaatttggttttgggaggtgaggcttcccaaccacggaagactacttt

SEQ ID NO: 3673 - DNA, 50 bp, Homo sapiens; identical to SEQ ID NO: 3039

SEQ ID NO: 3674 - DNA, 50 bp, Homo sapiens
gacgccttacaaatgatggaggattccaaagagtttttgtttatttgggt

SEQ ID NO: 3675 - DNA, 50 bp, Homo sapiens; identical to SEQ ID NO: 2992

SEQ ID NO: 3676 - DNA, 50 bp, Homo sapiens; identical to SEQ ID NO: 123

SEQ ID NO: 3677 - DNA, 50 bp, Homo sapiens
cagctctgggaaatagaagactagggttgtttcttaaatttagctcatgt

SEQ ID NO: 3678 - DNA, 50 bp, Homo sapiens
tgacttatgagctgtgactcaactgcttcattaaacattctgcattgggt

SEQ ID NO: 3679 - DNA, 50 bp, Homo sapiens
acactgagatagtcagttgtgtgtgactctaataaacggagcctaccttt

SEQ ID NO: 3680 - DNA, 50 bp, Homo sapiens; identical to SEQ ID NO: 3153

SEQ ID NO: 3681 - DNA, 50 bp, Homo sapiens
ggatgataacaccctatgcccattgtcctgatctgaaaattcttggaaat

SEQ ID NO: 3682 - DNA, 50 bp, Homo sapiens; identical to SEQ ID NO: 117

SEQ ID NO: 3683 - DNA, 50 bp, Homo sapiens
aaaagcatttaagttgaatgcgaccaaccttgtgctcttttcattctgga

SEQ ID NO: 3684 - DNA, 50 bp, Homo sapiens
ccttgagaaacacccatctccactcctagacaaaccaatgaacattagtc

SEQ ID NO: 3685 - DNA, 50 bp, Homo sapiens
tcttaaggtgtggcagagacagggtatttgggatatacttttcagactcc

SEQ ID NO: 3686 - DNA, 50 bp, Homo sapiens
aacaataaaatatggctagactggcctctggttgcctaaacagagcatca

SEQ ID NO: 3687 - DNA, 50 bp, Homo sapiens
cttaactgagggcttgtcctggttataaatgtctgggtgggggtgggcac

SEQ ID NO: 3688 - DNA, 50 bp, Homo sapiens
aactgtgaggcaaataaaatgcttctcaaactgtgtggctcttatggggt

SEQ ID NO: 3689 - DNA, 50 bp, Homo sapiens
gtggctaagtcattgcaggaacggggctgtgttctctgctgggacaaaac

SEQ ID NO: 3690 - DNA, 50 bp, Homo sapiens
attgcgactgtatggagaagaactgtttgtcattcagtgccgtgggatat

SEQ ID NO: 3691 - DNA, 50 bp, Homo sapiens
tttatagaacaattcctttctcttctcttgaatgtggcagtcattactgc

SEQ ID NO: 3692 - DNA, 50 bp, Homo sapiens
ttgattagagcaatgggaagcatactgtggcctaccagcatctggaagtg

SEQ ID NO: 3693 - DNA, 50 bp, Homo sapiens
tcaattgaggccccttccctaagattacaacattgataacctgtcctttt

SEQ ID NO: 3694 - DNA, 50 bp, Homo sapiens
cagccctccgtcgctttttataaaactttgtgtgagaagaatatattgat

SEQ ID NO: 3695 - DNA, 50 bp, Homo sapiens
acttcagatccttttgtgtttaaataaaggaaaagctgcacatccaaaaa

SEQ ID NO: 3696 - DNA, 50 bp, Homo sapiens
agcctacctcctaccccagctgtctgttgagagcagtgctgaccccagca

SEQ ID NO: 3697 - DNA, 50 bp, Homo sapiens
gaagagctgctctcacctctctgcatcccaatagatatccccctatgtgc

SEQ ID NO: 3698 - DNA, 50 bp, Homo sapiens; identical to SEQ ID NO: 1921

SEQ ID NO: 3699 - DNA, 50 bp, Homo sapiens
aaatacaaacattctaattaaaggctttgcaacacatgccttgtctgttt

SEQ ID NO: 3700 - DNA, 50 bp, Homo sapiens
gccattaccaactgtaccttcccttcttgctcagccaataaatatatcct

SEQ ID NO: 3701 - DNA, 50 bp, Homo sapiens; identical to SEQ ID NO: 1986

SEQ ID NO: 3702 - DNA, 50 bp, Homo sapiens; identical to SEQ ID NO: 1875

SEQ ID NO: 3703 - DNA, 50 bp, Homo sapiens
ctggggaggaggtccagggaggaggaggaaagttctcaagttcgtctgac

SEQ ID NO: 3704 - DNA, 50 bp, Homo sapiens
aactaacagtcacgccgtgggatgtctctgtccacattaaactaacagca

SEQ ID NO: 3705 - DNA, 50 bp, Homo sapiens; identical to SEQ ID NO: 2151

SEQ ID NO: 3706 - DNA, 50 bp, Homo sapiens
tttgtctatattctgctcccagcctgccaggccaggaggaaataaacatg

SEQ ID NO: 3707 - DNA, 50 bp, Homo sapiens
ttcctctttggccacaagaataagcagcaaataaacaactatggctgttg

SEQ ID NO: 3708 - DNA, 50 bp, Homo sapiens; identical to SEQ ID NO: 3126

SEQ ID NO: 3709 - DNA, 50 bp, Homo sapiens
gcagtttgaatatcctttgtttcagagccagatcatttcttggaaagtgt

SEQ ID NO: 3710 - DNA, 50 bp, Homo sapiens
ccctggttgacttgactcatgcttgtttcactttcacatggaatttccca

SEQ ID NO: 3711 - DNA, 50 bp, Homo sapiens; identical to SEQ ID NO: 2005

SEQ ID NO: 3712 - DNA, 50 bp, Homo sapiens
cacaaggtaaagaaactcaattcccctgcttggagcccagcaaacacaat

SEQ ID NO: 3713 - DNA, 50 bp, Homo sapiens
tgtggaggaaactaaacattcccttgatggtctcaagctatgatcagaag

SEQ ID NO: 3714 - DNA, 50 bp, Homo sapiens
ggaggagaccagtcccccacccagccgtaccagaaataaaggcttctgtg

SEQ ID NO: 3715 - DNA, 50 bp, Homo sapiens; identical to SEQ ID NO: 243

SEQ ID NO: 3716 - DNA, 50 bp, Homo sapiens
cgctgttaggccggaattaaagtggctttttgaggtttggtttttcacaa

SEQ ID NO: 3717 - DNA, 50 bp, Homo sapiens
ggggtttatgtcctaactgctttgtatgctgttttataaagggatagaag

SEQ ID NO: 3718 - DNA, 50 bp, Homo sapiens
acaccaacctgcttccactttattcttgtttacacattctcctgctccca

SEQ ID NO: 3719 - DNA, 50 bp, Homo sapiens
aagatgtttgtggaaatgttcatttgtatctggatctctgttatgtgcca

SEQ ID NO: 3720 - DNA, 50 bp, Homo sapiens; identical to SEQ ID NO: 3482

SEQ ID NO: 3721 - DNA, 50 bp, Homo sapiens; identical to SEQ ID NO: 2348

SEQ ID NO: 3722 - DNA, 50 bp, Homo sapiens; identical to SEQ ID NO: 1983

SEQ ID NO: 3723 - DNA, 50 bp, Homo sapiens
tcgaatcattgaagatccgagtgtgatttgaattctgtgatattttcaca

SEQ ID NO: 3724 - DNA, 50 bp, Homo sapiens
atatccaatattcgctgtgtcagcatagaagtaacttacttaggtgtggg

SEQ ID NO: 3725 - DNA, 50 bp, Homo sapiens; identical to SEQ ID NO: 1980

SEQ ID NO: 3726 - DNA, 50 bp, Homo sapiens; identical to SEQ ID NO: 2712

SEQ ID NO: 3727 - DNA, 50 bp, Homo sapiens
tctccatgttgtcaaaatcatgccgtttatagctattttcacctcagtgg

SEQ ID NO: 3728 - DNA, 50 bp, Homo sapiens
gccccgttttggggacgtgaacgttttaataatttttgctgaattcttta

SEQ ID NO: 3729 - DNA, 50 bp, Homo sapiens
aggtgggcacaagtattacacatcagaaaatcctgacaaaagggacacat

SEQ ID NO: 3730 - DNA, 50 bp, Homo sapiens
gttcaacaacaccagaactgtgtgtctcatggtatgtaactcttaaagca

SEQ ID NO: 3731 - DNA, 50 bp, Homo sapiens; identical to SEQ ID NO: 2480

SEQ ID NO: 3732 - DNA, 50 bp, Homo sapiens
aaagctgttcaaatactcgagcccagtcttgtggatggaaatgtagtgct

SEQ ID NO: 3733 - DNA, 50 bp, Homo sapiens
cttaagtctgacggacctgtcctgtccaggccagtgcccagggaaggtgt

SEQ ID NO: 3734 - DNA, 50 bp, Homo sapiens
tttctaaccctgacacggactgtgcatactttccctcatccatgctgtgc

SEQ ID NO: 3735 - DNA, 50 bp, Homo sapiens
cagcagctgcctgcttttctgtgatgtatgtatcctgttgacttttccag

SEQ ID NO: 3736 - DNA, 50 bp, Homo sapiens; identical to SEQ ID NO: 2756

SEQ ID NO: 3737 - DNA, 50 bp, Homo sapiens; identical to SEQ ID NO: 113

SEQ ID NO: 3738 - DNA, 50 bp, Homo sapiens
acccatttctactttttgcaccttattttctctgttcctgagcccccaca

SEQ ID NO: 3739 - DNA, 50 bp, Homo sapiens; identical to SEQ ID NO: 2362

SEQ ID NO: 3740 - DNA, 50 bp, Homo sapiens
ggcccagcattgctggttctatttaatggacatgagataatgttagaggt

SEQ ID NO: 3741 - DNA, 50 bp, Homo sapiens
tgaatataatatatttgtgtatttaacagggaggggaagagggggcgatc

SEQ ID NO: 3742 - DNA, 50 bp, Homo sapiens
tggcactttaacattgctttcacctatattttgtgtactttgttacttgc

SEQ ID NO: 3743 - DNA, 50 bp, Homo sapiens
agtaaatgtacagtgatttgaaatacaataatgaaggcaatgcatggcct

SEQ ID NO: 3744 - DNA, 50 bp, Homo sapiens
cttaatgtgacctagcaataggcatagctacgtggcactatattctggcc

SEQ ID NO: 3745 - DNA, 50 bp, Homo sapiens
aggagcacctcacagatgccaacctcaacctgaccgtggacgagggtgtc

SEQ ID NO: 3746 - DNA, 50 bp, Homo sapiens
ccacgacttctgcccattctctccagtgtgtgtaacagggtcacaagaat

SEQ ID NO: 3747 - DNA, 50 bp, Homo sapiens
ggcccaaacctatttgtaaccaaagagctgggagcagcacaaggacccag

SEQ ID NO: 3748 - DNA, 50 bp, Homo sapiens
gcgagcaagcattttgaacacatggatttccttgaagcaggctgacaaga

SEQ ID NO: 3749 - DNA, 50 bp, Homo sapiens
tcggatgggctgtttagatgttatataatccacaaaaggttcattgagct

SEQ ID NO: 3750 - DNA, 50 bp, Homo sapiens; identical to SEQ ID NO: 2285

SEQ ID NO: 3751 - DNA, 50 bp, Homo sapiens
aaaatgaagtcacacaggacaattattcttatgcctaagttaacagtgga

SEQ ID NO: 3752 - DNA, 50 bp, Homo sapiens
gccttgtttaatggtagttttacagtgtttctggcttagaacaaaggggc

SEQ ID NO: 3753 - DNA, 50 bp, Homo sapiens; identical to SEQ ID NO: 3034

SEQ ID NO: 3754 - DNA, 50 bp, Homo sapiens; identical to SEQ ID NO: 2199

SEQ ID NO: 3755 - DNA, 50 bp, Homo sapiens; identical to SEQ ID NO: 3388

SEQ ID NO: 3756 - DNA, 50 bp, Homo sapiens
tggtataagaaatgactttgaaccactttgcaattgtagattcccaacaa

SEQ ID NO: 3757 - DNA, 50 bp, Homo sapiens
cccctgctactttgaaaccagaaaataatgactggccattcgttacatct

SEQ ID NO: 3758 - DNA, 50 bp, Homo sapiens; identical to SEQ ID NO: 2508

SEQ ID NO: 3759 - DNA, 50 bp, Homo sapiens
aaaagccttgtgaaaatgttatgccctatgtaacagcagagtaacataaa

SEQ ID NO: 3760 - DNA, 50 bp, Homo sapiens
ccaccacgggagactagagctgcaggatcccgggggaggggtctctcctc

SEQ ID NO: 3761 - DNA, 50 bp, Homo sapiens
cagtggaagtcccacagaagctacagctgccaggtcacgcatgaagggag

SEQ ID NO: 3762 - DNA, 50 bp, Homo sapiens
cccacactgctttgctgtgtatacgcttgttgccctgaaataaatatgca

SEQ ID NO: 3763 - DNA, 50 bp, Homo sapiens; identical to SEQ ID NO: 3762

SEQ ID NO: 3764 - DNA, 50 bp, Homo sapiens; identical to SEQ ID NO: 1425

SEQ ID NO: 3765 - DNA, 50 bp, Homo sapiens
agagaccagttttctctggaagtttgtttaaatgacagaagcgtatatga

SEQ ID NO: 3766 - DNA, 50 bp, Homo sapiens
cgcccctgccacctccctgacccgtctaatatataaatatagagatgtgt

SEQ ID NO: 3767 - DNA, 50 bp, Homo sapiens
gccagtcagatgtttctcatccttcttgctctgcctttgagttgttccgt

SEQ ID NO: 3768 - DNA, 50 bp, Homo sapiens
aaatactgatgttcctagtgaaagaggcagcttgaaactgagatgtgaac

SEQ ID NO: 3769 - DNA, 50 bp, Homo sapiens
agaagctgcactaggccccgagtccccatgtgtctccttgaattgatgag

SEQ ID NO: 3770 - DNA, 50 bp, Homo sapiens; identical to SEQ ID NO: 2177

SEQ ID NO: 3771 - DNA, 50 bp, Homo sapiens
aaattttatttccagctcctgttccttggaaaatctccattgtatgtgca

SEQ ID NO: 3772 - DNA, 50 bp, Homo sapiens
cctgaaacagctgccaccatcactcgcaagagaatcccctccatctttgg

SEQ ID NO: 3773 - DNA, 50 bp, Homo sapiens
ttctgtgtgtatggtagcacagcaaacttgtaggaattagtatcaatagt

SEQ ID NO: 3774 - DNA, 50 bp, Homo sapiens; identical to SEQ ID NO: 2106

SEQ ID NO: 3775 - DNA, 50 bp, Homo sapiens
gatctcctcttagggtagaagaagtctctgggacatccctggggtgtgtg

SEQ ID NO: 3776 - DNA, 50 bp, Homo sapiens
ggctgccgcaataaaacccagatttctttggtgcgaatgccttacgcatg

SEQ ID NO: 3777 - DNA, 50 bp, Homo sapiens
tcatcatctggatttaggaattgctcttgtcatacccccaagtttctaag

SEQ ID NO: 3778 - DNA, 50 bp, Homo sapiens
tgcccaccactgaaagagtgactttgacaagatgtttctacctcttccca

SEQ ID NO: 3779 - DNA, 50 bp, Homo sapiens
tttgatcaggattcagatgtggacatcttcccctcagacttccctactga

SEQ ID NO: 3780 - DNA, 50 bp, Homo sapiens; identical to SEQ ID NO: 180

SEQ ID NO: 3781 - DNA, 50 bp, Homo sapiens
cggattgttgctgttaatgctgctcattttagcactgtggaagattggat

SEQ ID NO: 3782 - DNA, 50 bp, Homo sapiens
tagagattgtgaagaagaatttcgatctccgccctggggtcattgtcagg

SEQ ID NO: 3783 - DNA, 50 bp, Homo sapiens; identical to SEQ ID NO: 2036

SEQ ID NO: 3784 - DNA, 50 bp, Homo sapiens; identical to SEQ ID NO: 2461

SEQ ID NO: 3785 - DNA, 50 bp, Homo sapiens
ggaagaaccgtccagagctgagtgacgctgggatccgggatcaaagttgg

SEQ ID NO: 3786 - DNA, 50 bp, Homo sapiens
tgtgcattgttattgagttgtactgtaccttatttggaaggatgaaggaa

SEQ ID NO: 3787 - DNA, 50 bp, Homo sapiens; identical to SEQ ID NO: 2727

SEQ ID NO: 3788 - DNA, 50 bp, Homo sapiens
agaagcatgtcactttcatgttcctccctaactccctgacctgagaaccc

SEQ ID NO: 3789 - DNA, 50 bp, Homo sapiens
ggatgctcctcccttctctacctcatgggggtattgtataagtccttgca

SEQ ID NO: 3790 - DNA, 50 bp, Homo sapiens
gcaccatctgtcttcatcttccgccatctgatgagcagttgaaatctgga

SEQ ID NO: 3791 - DNA, 50 bp, Homo sapiens; identical to SEQ ID NO: 3790

SEQ ID NO: 3792 - DNA, 50 bp, Homo sapiens; identical to SEQ ID NO: 2358

SEQ ID NO: 3793 - DNA, 50 bp, Homo sapiens
ggcctgttactctccatgactaactgtgtaagtgcttaaaatggaataaa

SEQ ID NO: 3794 - DNA, 50 bp, Homo sapiens; identical to SEQ ID NO: 2847

SEQ ID NO: 3795 - DNA, 50 bp, Homo sapiens
tcttgataccacctatatagatgcagcattttgtatttgtctaactgggg

SEQ ID NO: 3796 - DNA, 50 bp, Homo sapiens; identical to SEQ ID NO: 2443

SEQ ID NO: 3797 - DNA, 50 bp, Homo sapiens; identical to SEQ ID NO: 2477

SEQ ID NO: 3798 - DNA, 50 bp, Homo sapiens
ttgaggggattaatatgaaaacttatgacctcttcctttaggagggagtt

SEQ ID NO: 3799 - DNA, 50 bp, Homo sapiens
tgttaaaacccctatagccaccttttgggaatgttttaaattctccagtt

SEQ ID NO: 3800 - DNA, 50 bp, Homo sapiens
tggcaggcgtcaaccccattttatttgtccttattcctgtggaagcagta

SEQ ID NO: 3801 - DNA, 50 bp, Homo sapiens
aatacacctgcttcacgtccctatgttgggaagtccatatttgtctgctt

SEQ ID NO: 3802 - DNA, 50 bp, Homo sapiens
caggaaatgcagcaacttcaggaaatgcagcaacaaaaatacctactcct

SEQ ID NO: 3803 - DNA, 50 bp, Homo sapiens
aaacccagttgccatctgcgtgacaataaaacattaatgctaacactttt

SEQ ID NO: 3804 - DNA, 50 bp, Homo sapiens
tgctgtattacttctgaaaagactgtgcagtgtgttagttgttggctgaa

SEQ ID NO: 3805 - DNA, 50 bp, Homo sapiens
gtgtatgagagagagagtgtgtgtttgtgtgtttcaaggtcagaacaggt

SEQ ID NO: 3806 - DNA, 50 bp, Homo sapiens; identical to SEQ ID NO: 2025

SEQ ID NO: 3807 - DNA, 50 bp, Homo sapiens
tgtccccttccccaccctctagtgtatttcacagaaaacaaaacctccca

SEQ ID NO: 3808 - DNA, 50 bp, Homo sapiens
agtccagttttatgattctgcttttatgtgtcccttgataacagtgactt

SEQ ID NO: 3809 - DNA, 50 bp, Homo sapiens
aaactcatctgtccaagttcgtggcagaaaggaacgtccttgtgaagacc

SEQ ID NO: 3810 - DNA, 50 bp, Homo sapiens
agagcactgggtagccaagtgatcttcccattcacagagttagtaaacct

SEQ ID NO: 3811 - DNA, 50 bp, Homo sapiens
cccccagagaccccatttgcctctcaacactcagaccttcaactgttttt

SEQ ID NO: 3812 - DNA, 50 bp, Homo sapiens
ccagtgacaccccatattcatcacaaaattaaagcaagaagtccatagta

SEQ ID NO: 3813 - DNA, 50 bp, Homo sapiens
tgacaccaagacccaccccaatccagacttcacacagtattctcccccac

SEQ ID NO: 3814 - DNA, 50 bp, Homo sapiens
gactgcaagtcactcttaggggctgtacttccttagtactggtagcatta

SEQ ID NO: 3815 - DNA, 50 bp, Homo sapiens
aactgagcatcacgaaccctgtttggcagactgaggtcacgatggagggg

SEQ ID NO: 3816 - DNA, 50 bp, Homo sapiens
tcctccattgaagaagaatgtcaacaagaaaggaaaaatagacaaactgg

SEQ ID NO: 3817 - DNA, 50 bp, Homo sapiens
aagtctcgaatgtaattggaatcttcacctcagagtggagttgaactgct

SEQ ID NO: 3818 - DNA, 50 bp, Homo sapiens; identical to SEQ ID NO: 1984

SEQ ID NO: 3819 - DNA, 50 bp, Homo sapiens
acaaaaatagctatatcaagggctggcacctagacattaaactgtacttt

SEQ ID NO: 3820 - DNA, 50 bp, Homo sapiens
gtccaccagtctctgaaattagaacagtaggcggtatgagataatcaggc

SEQ ID NO: 3821 - DNA, 50 bp, Homo sapiens
gaaatgtagctggagtcatcatttagcagagcacggtgtccctgggttgg

SEQ ID NO: 3822 - DNA, 50 bp, Homo sapiens
gcctctgtgatccccatgtgttttgattcctgctctttgttacagttcca

SEQ ID NO: 3823 - DNA, 50 bp, Homo sapiens
aaaacaagaaacaaatgtgcccaccccactttccgcttaactgaaaagct

SEQ ID NO: 3824 - DNA, 50 bp, Homo sapiens
gtaaaaaggctgtctgtgattttccagggtttggtgggggtagggagggg

SEQ ID NO: 3825 - DNA, 50 bp, Homo sapiens
ctgactgagtctcagaatgctcaggaccaaggtgcagagatggacaagag

SEQ ID NO: 3826 - DNA, 50 bp, Homo sapiens
agcttcttgggttcctaattcctggtgtttaataattctctccacgatca

SEQ ID NO: 3827 - DNA, 50 bp, Homo sapiens; identical to SEQ ID NO: 3328

SEQ ID NO: 3828 - DNA, 50 bp, Homo sapiens
atttccagtgagcttatcatgctgtctttacatggggttttcaattttgc

SEQ ID NO: 3829 - DNA, 50 bp, Homo sapiens
tgcagctcaccagccccaggggcagaagagacccaaccacttcctatttt

SEQ ID NO: 3830 - DNA, 50 bp, Homo sapiens; identical to SEQ ID NO: 2415

SEQ ID NO: 3831 - DNA, 50 bp, Homo sapiens
tgtatatagactctggtgttctattgctgagaagcaaaccgccctgcagc

SEQ ID NO: 3832 - DNA, 50 bp, Homo sapiens
atgtcagttctgttttaagtaacagaattgataactgagcaaggaaacgt

SEQ ID NO: 3833 - DNA, 50 bp, Homo sapiens
ttggagctaagctgccacctggttaattaaggtcccaacagtgagttgtg

SEQ ID NO: 3834 - DNA, 50 bp, Homo sapiens
ctttggagggtgtcttctgggtagagggatgggaaggaagggacccttac

SEQ ID NO: 3835 - DNA, 50 bp, Homo sapiens; identical to SEQ ID NO: 2332

SEQ ID NO: 3836 - DNA, 50 bp, Homo sapiens; identical to SEQ ID NO: 2120

SEQ ID NO: 3837 - DNA, 50 bp, Homo sapiens
tttggcttagtgttttcattgcaaattataattgctgtagagccacacac

SEQ ID NO: 3838 - DNA, 50 bp, Homo sapiens; identical to SEQ ID NO: 2596

SEQ ID NO: 3839 - DNA, 50 bp, Homo sapiens
aacaaaagatgaagacctagtgttttggatgggaagcacctgtagaccat

SEQ ID NO: 3840 - DNA, 50 bp, Homo sapiens
acatgtgcaaataaatgtggcttagacttgtgtgactgcttaagactaaa

SEQ ID NO: 3841 - DNA, 50 bp, Homo sapiens; identical to SEQ ID NO: 2583

SEQ ID NO: 3842 - DNA, 50 bp, Homo sapiens; identical to SEQ ID NO: 2141

SEQ ID NO: 3843 - DNA, 50 bp, Homo sapiens
cactcttcacctattgtatgaccaaataaaggttatgctgcttgttacgc

SEQ ID NO: 3844 - DNA, 50 bp, Homo sapiens
tgctaggtgatggagtagaaatggattccctctgggaatggtttcttggt

SEQ ID NO: 3845 - DNA, 50 bp, Homo sapiens
tatgaaaacagtggattggttgggttttgtgcagggtcttgggttagagc

SEQ ID NO: 3846 - DNA, 50 bp, Homo sapiens
tgcatggatcaatcagtgtgattagctttctcagcagacattgtgccata

SEQ ID NO: 3847 - DNA, 50 bp, Homo sapiens; identical to SEQ ID NO: 2356

SEQ ID NO: 3848 - DNA, 50 bp, Homo sapiens
gcagcacactctgagaaagaaacttatcctctcctacacataagaaacca

SEQ ID NO: 3849 - DNA, 50 bp, Homo sapiens
tgcaagacacctgtttatcatcttgtttaaatgtaaatgtccccttatgc

SEQ ID NO: 3850 - DNA, 50 bp, Homo sapiens
tcaacgccaatatgtattctacaaaagagaatggttttaggctccagtgt

SEQ ID NO: 3851 - DNA, 50 bp, Homo sapiens
tggatcatcaaggtgaaacactttggtattctttggcaatcagtgctcct

SEQ ID NO: 3852 - DNA, 50 bp, Homo sapiens
gatacactgtctctcttcataggactgtttaggctctgcatcaagattgc

SEQ ID NO: 3853 - DNA, 50 bp, Homo sapiens
aaggcagggatcatgacacctgaggagtctagtttatggcttcagttgga

SEQ ID NO: 3854 - DNA, 50 bp, Homo sapiens
atggatggactgatctgaaaatcgacctcaactcaagggtggtcagctca

SEQ ID NO: 3855 - DNA, 50 bp, Homo sapiens
tgctaatgtaatcggtttttgtaatggcgtcacaaataaaaggatgctta

SEQ ID NO: 3856 - DNA, 50 bp, Homo sapiens
tgcaagacatagaatagtgttggaaaatgtgcaatatgtgatgtggcaaa

SEQ ID NO: 3857 - DNA, 50 bp, Homo sapiens
aagtttgtgaatgtgactacttagtggtgtatatgagactttcaagggaa

SEQ ID NO: 3858 - DNA, 50 bp, Homo sapiens; identical to SEQ ID NO: 2253

SEQ ID NO: 3859 - DNA, 50 bp, Homo sapiens
ctgtgcctcccccgccacctgtgtgttcttttgatacatttatcttctgt

SEQ ID NO: 3860 - DNA, 50 bp, Homo sapiens
tgtatatttatggtgggaggtggttgggaacttttaacaaaatggggtgt

SEQ ID NO: 3861 - DNA, 50 bp, Homo sapiens
tcctttggaaacagaatgaagcagaggaaactcttaatacttaaaatcgt

SEQ ID NO: 3862 - DNA, 50 bp, Homo sapiens; identical to SEQ ID NO: 2625

SEQ ID NO: 3863 - DNA, 50 bp, Homo sapiens; identical to SEQ ID NO: 1910

SEQ ID NO: 3864 - DNA, 50 bp, Homo sapiens; identical to SEQ ID NO: 2474

SEQ ID NO: 3865 - DNA, 50 bp, Homo sapiens
tgcttgattaagatgccataatagtgctgtatttgcagtgtgggctaaga

SEQ ID NO: 3866 - DNA, 50 bp, Homo sapiens
tcttctgtttcatcctgcggttctggaaccagattttgacttgcgtgtca

SEQ ID NO: 3867 - DNA, 50 bp, Homo sapiens; identical to SEQ ID NO: 2515

SEQ ID NO: 3868 - DNA, 50 bp, Homo sapiens
atgcatctaccgctccttgggaaataatctgaaaggtctaaaaataaaaa

SEQ ID NO: 3869 - DNA, 50 bp, Homo sapiens
cgcaagaagcaggaagaggaaagagaagaaaagcacaacggggaaagata

SEQ ID NO: 3870 - DNA, 50 bp, Homo sapiens
gtagtgtgttgcatccctctcaccctctgatcttcgtcagtcgtgtcatg

SEQ ID NO: 3871 - DNA, 50 bp, Homo sapiens
gagggaaacccggtaataggctgggagtaatccacacacgtgctaacatt

SEQ ID NO: 3872 - DNA, 50 bp, Homo sapiens
cacacactgctacgtgacgtaccactactgccagcgcagcactagctcac

SEQ ID NO: 3873 - DNA, 50 bp, Homo sapiens
ggatcgtgacacaccgggttacacactttccacaccgtaattccatcaat

SEQ ID NO: 3874 - DNA, 50 bp, Homo sapiens
ggttgcaccaaggctgcctaggagaagtgcctgactggactaccccgatc

SEQ ID NO: 3875 - DNA, 50 bp, Homo sapiens
tctgccatctgtctatttcccaattttccttctgactgttcctttctcct

SEQ ID NO: 3876 - DNA, 50 bp, Homo sapiens
ctgtgatattttggtcatgggctggtctggtcggtttcccatttgtctgg

SEQ ID NO: 3877 - DNA, 50 bp, Homo sapiens
tacgacatttgcgaaattcgctaaaaacaagggggagttcacgcggccat

SEQ ID NO: 3878 - DNA, 50 bp, Homo sapiens
gcgcaggttaccggaacccaaggtcctttgaaattcacaactctctttgg

SEQ ID NO: 3879 - DNA, 50 bp, Homo sapiens
agctgtggaaagggcaacctgtggtttctctgtactggtgtttaatgggg

SEQ ID NO: 3880 - DNA, 50 bp, Homo sapiens
cacaaacacccgcccgagcaaccacagacacaggacacgacaccacacac

SEQ ID NO: 3881 - DNA, 50 bp, Homo sapiens
aaagggttacttttcaaaacagtctcctttcgaccggggtcagggtggcc

SEQ ID NO: 3882 - DNA, 50 bp, Homo sapiens
ggtggacagtataaggcggttaagatccgttgatggcgaaggtgagaatg

SEQ ID NO: 3883 - DNA, 50 bp, Homo sapiens
gacagagcgagtagacgggaggcggagaaggaagaggagacgagacgagg

SEQ ID NO: 3884 - DNA, 50 bp, Homo sapiens
caagacacagaggcaacggagagacacgcagacaagcaaggccacggaac

SEQ ID NO: 3885 - DNA, 50 bp, Homo sapiens
agggataggataattacagaggtactgagactcctggcgtgggtgactct

SEQ ID NO: 3886 - DNA, 50 bp, Homo sapiens
cccatcatgaaaaaacgccttaggagccgaagaagaaaacctcgggaaaa

SEQ ID NO: 3887 - DNA, 50 bp, Homo sapiens
gacacagcgagagtccaggaacaggcagacaagcgagaaagaggagaagc

SEQ ID NO: 3888 - DNA, 50 bp, Homo sapiens
gtaggaggcgagaaggaagaacaaggcacaccgaaggagcaagaccagac

SEQ ID NO: 3889 - DNA, 50 bp, Homo sapiens
caagaagcagaagcagcaaccagagacagagagacaaacgcagaacaaca

SEQ ID NO: 3890 - DNA, 50 bp, Homo sapiens
caacaagcagacgaacaacaacaaatatcaacgaggcgcagcagctcaaa

SEQ ID NO: 3891 - DNA, 50 bp, Homo sapiens
aacacacaagagaaacataaccactaaatcactacaaacacacacagaat

SEQ ID NO: 3892 - DNA, 50 bp, Homo sapiens
aaacgaattcttgcactgagagtgttcacagcgccactttcctcctcctc

SEQ ID NO: 3893 - DNA, 50 bp, Homo sapiens
cgagaagcagaagatgacagcagagcgaaagcagagaacgaacagacaag

SEQ ID NO: 3894 - DNA, 50 bp, Homo sapiens
ttggatttattaaagtccctttggaagtcttctaccattactgtagacca

SEQ ID NO: 3895 - DNA, 50 bp, Homo sapiens
tcacataccctatgccgactgagtggaacgagccgactatcacacagagc

SEQ ID NO: 3896 - DNA, 50 bp, Homo sapiens
cacatgcgcaataaacccggcgaagacgccactctgcggcaaaggacaca

SEQ ID NO: 3897 - DNA, 50 bp, Homo sapiens
ccgcagacacgaaagcaccaaccaccgaccgccaccagaaggaacaacag

SEQ ID NO: 3898 - DNA, 50 bp, Homo sapiens
gggcacttaaatggtcacctgtgtaacagtttggtgtaactcccagtgat

SEQ ID NO: 3899 - DNA, 50 bp, Homo sapiens
acaacacgaaaacgaacaagcaaagaaagaaaacggacacgagcgaacca

SEQ ID NO: 3900 - DNA, 50 bp, Homo sapiens; identical to SEQ ID NO: 3894

SEQ ID NO: 3901 - DNA, 50 bp, Homo sapiens
cagccatgtccatgacaaccagagcctgggaggagctggatggcggcctg

SEQ ID NO: 3902 - DNA, 50 bp, Homo sapiens
aaacacacagcaagaaccacgaaaagagcaacccaaaataggaaaagcgg

SEQ ID NO: 3903 - DNA, 50 bp, Homo sapiens
acagcgtggatataaggaccaagagactagggcgcatactatgattcgca

SEQ ID NO: 3904 - DNA, 50 bp, Homo sapiens
atggacacgaggacggaactgggggtactagaacaacccttctctgaaaa

SEQ ID NO: 3905 - DNA, 50 bp, Homo sapiens
agaccaaacgagaaggagaaaaagcaagaccacaaaagacaacaacagcg

SEQ ID NO: 3906 - DNA, 50 bp, Homo sapiens
aaaaaatcgggctttttctgggggaaagggaagggcggggaatgctggcc

SEQ ID NO: 3907 - DNA, 50 bp, Homo sapiens
ctacaacaatacagcacacagcataagcgcacagggcatagactaggcaa

SEQ ID NO: 3908 - DNA, 50 bp, Homo sapiens
caagagagtggagacgagtacgcgagaacgcacgacacagagcgcaagaa

SEQ ID NO: 3909 - DNA, 50 bp, Homo sapiens
tctgctgccctcttaagatctgactgccaaataaatcatcctcatgtcct

SEQ ID NO: 3910 - DNA, 50 bp, Homo sapiens
gatgagaaacaaccacaaggaagagggcagcgccggagacctacagaaag

SEQ ID NO: 3911 - DNA, 50 bp, Homo sapiens
gcgggggcactggctcttcacatttggttgcgagttgcacacaccacaac

SEQ ID NO: 3912 - DNA, 50 bp, Homo sapiens
gggggaagcggaagggttggattgggtgaaaaaagaattgttcgtgttta

SEQ ID NO: 3913 - DNA, 50 bp, Homo sapiens
ataatagaggagagatattgtaaatagagactggcagcagtttccacaaa

SEQ ID NO: 3914 - DNA, 50 bp, Homo sapiens
agtggcaggtgcaattgtcggttcgatttgtgttcccaacagtctgaaat

SEQ ID NO: 3915 - DNA, 50 bp, Homo sapiens
gagcccacggggaagggaacccagcaacacggaaataagttggaccgatc

SEQ ID NO: 3916 - DNA, 50 bp, Homo sapiens
acaacctgagaaataattcggtcaataccagactccaacattcctgatct

SEQ ID NO: 3917 - DNA, 50 bp, Homo sapiens
gtctattacaaagtaaagagagtcaattactccaggaggagaattgcagg

SEQ ID NO: 3918 - DNA, 50 bp, Homo sapiens
accagacacggacacacacgaacacaagaaaacacaaaacaagagcaacc

SEQ ID NO: 3919 - DNA, 50 bp, Homo sapiens
cggttgggtcctcaaaatatgcctgtttggttaacaaaagcggttgtgaa

SEQ ID NO: 3920 - DNA, 50 bp, Homo sapiens
gataaagaaggggcgcgggaaacagcgagggaaggacgggctgggagaac

SEQ ID NO: 3921 - DNA, 50 bp, Homo sapiens
atctctggcaatactgtctgattacgggggtgatgccgacggttaaaaac

SEQ ID NO: 3922 - DNA, 50 bp, Homo sapiens
gaacacaaaaaacctcttctataacggggacacacgccaaggggacaagt

SEQ ID NO: 3923 - DNA, 50 bp, Homo sapiens
ttgggtgcaacaaccaatacacttatacttggaaaccacgggccatatta

SEQ ID NO: 3924 - DNA, 50 bp, Homo sapiens
aggaggaacaaaaaccgcagcgtggatttcaaatttctggaagtaagtct

SEQ ID NO: 3925 - DNA, 50 bp, Homo sapiens
aaattcgcgcaccctttgttttattgccccggttacaaggttttgaactg

SEQ ID NO: 3926 - DNA, 50 bp, Homo sapiens
cgggccagtatgaatgtagggtcaaggaacgccgagggtttcacaaaagg

SEQ ID NO: 3927 - DNA, 50 bp, Homo sapiens
ctcagtgtagggcagagaggtctaacaccaacataaggtactagcagtgt

SEQ ID NO: 3928 - DNA, 50 bp, Homo sapiens
agaatatatgtattttgaaaggaaaggacttggggatttttaacagggca

SEQ ID NO: 3929 - DNA, 50 bp, Homo sapiens
gagactctcgttgtctcctcttctgctctcttctctgttggaggggagga

SEQ ID NO: 3930 - DNA, 50 bp, Homo sapiens
aggttgtggggagtatgtttggaccaaaaattaaaatattgtgggaggga

SEQ ID NO: 3931 - DNA, 50 bp, Homo sapiens
gaccttacctggtggttttgtggtttgttctcccgaaaaatgcggggttt

SEQ ID NO: 3932 - DNA, 50 bp, Homo sapiens
caccctgggttttaaagtgtgggagaaaagcgcccggaagaaggaaacaa

SEQ ID NO: 3933 - DNA, 50 bp, Homo sapiens
gaggggaccggccatctgggcaagcagatatgctaattgggaattatagg

SEQ ID NO: 3934 - DNA, 50 bp, Homo sapiens
atgacttgtgaatacctgagttatactttcccaacagatgtgcctaacac

SEQ ID NO: 3935 - DNA, 50 bp, Homo sapiens
tgatagctcacttagttaattgttttgaagcaaattttgggttggatggg

SEQ ID NO: 3936 - DNA, 50 bp, Homo sapiens
gacacagaagagagacagaagagaaacggtcgaggagaagaagcaggagc

SEQ ID NO: 3937 - DNA, 50 bp, Homo sapiens
aaagaccagagacagggagacacggcagacagagcgccgacaaagaagag

SEQ ID NO: 3938 - DNA, 50 bp, Homo sapiens
caaggcgacatgggagagcgagaaggctaggaggacgacagacaaggaaa

SEQ ID NO: 3939 - DNA, 50 bp, Homo sapiens
gaattttggggaggttactggtcgggggaaataacagggttggacaaacg

SEQ ID NO: 3940 - DNA, 50 bp, Homo sapiens
ctccacatatgggtaacacactcggtccttacaagcacctagtcacttcc

SEQ ID NO: 3941 - DNA, 50 bp, Homo sapiens
gggaccagactgctttctaaatgcacagctctttcactatcagaatgtgt

SEQ ID NO: 3942 - DNA, 50 bp, Homo sapiens
tgtggtcacttgggaaataaattccatctggcttacccaatgggtggtgg

SEQ ID NO: 3943 - DNA, 50 bp, Homo sapiens
ccacagccacaacaccagacaagccgaccaacagacagatacagaccacc

SEQ ID NO: 3944 - DNA, 50 bp, Homo sapiens
accacagcaagacaacaaggacgagaaagagaacagacaatgagcaacga

SEQ ID NO: 3945 - DNA, 50 bp, Homo sapiens
actactgcttgcgtacctctccgctttccctctccttactatcgaccata

SEQ ID NO: 3946 - DNA, 50 bp, Homo sapiens
tccgtttatattagcactgtatcccttgtgccatccaacattttgtatgt

SEQ ID NO: 3947 - DNA, 50 bp, Homo sapiens
cgggcgcaggacagtagcagagaagagaggtggagagccggacaacgcag

SEQ ID NO: 3948 - DNA, 50 bp, Homo sapiens
cttcagtcattatgggctcagtttcctcactattggttcctcgcaaggga

SEQ ID NO: 3949 - DNA, 50 bp, Homo sapiens
aagagcaacaacgaggcgaagaggaaggaggaggcaagacagaagaggaa

SEQ ID NO: 3950 - DNA, 50 bp, Homo sapiens
gaggagcaacgaccagagagacgaactgacatcaaccatagaagacgaca

SEQ ID NO: 3951 - DNA, 50 bp, Homo sapiens
aagcatgaagaagacctggatgaggctcagggaggttcccccagtttaaa

SEQ ID NO: 3952 - DNA, 50 bp, Homo sapiens
atcagtcaatcagtcagcttctcagagtagcaatccatgtgtccagagga

SEQ ID NO: 3953 - DNA, 50 bp, Homo sapiens
aaatccaatccttcggagagggaatgggcggtattaattaagggaagtcc

SEQ ID NO: 3954 - DNA, 50 bp, Homo sapiens
atgacaagacaagccagacgaagaagacaaacaagggagacacagcagac

SEQ ID NO: 3955 - DNA, 50 bp, Homo sapiens
tgcgccccaatatttgtggaacagcgttttgttcgaataaaacgatcggt

SEQ ID NO: 3956 - DNA, 50 bp, Homo sapiens
ctcgaggtgtaactcaggaaggcctagcgaatcccgactcggatggtgtc

SEQ ID NO: 3957 - DNA, 50 bp, Homo sapiens
ttcacctactctgttcttttcatccatcccctgagtcagttggttggagg

SEQ ID NO: 3958 - DNA, 50 bp, Homo sapiens
ctgttgtctggagtgtggagtctcttgtctggattgtggagtctcttgtc

SEQ ID NO: 3959 - DNA, 50 bp, Homo sapiens
caagatgatgcttgctgtcttttcctctcggctacccagaatggcatttg

SEQ ID NO: 3960 - DNA, 50 bp, Homo sapiens
agtactcatgacttgagagacgtggacggagccagcttctaccttgcttg

SEQ ID NO: 3961 - DNA, 50 bp, Homo sapiens
ggtccgaccaattaatgactccatgatcggcctcggttttcacaaacctt

SEQ ID NO: 3962 - DNA, 50 bp, Homo sapiens
agacaaagagagcataaatatagctctactcatgggtaccataccagtgt

SEQ ID NO: 3963 - DNA, 50 bp, Homo sapiens
ttacatttgtggaccatgttacagttaaagaaaaatcctgtttcagtcct

SEQ ID NO: 3964 - DNA, 50 bp, Homo sapiens
gcaggttatcgcaagatgtcttagagtagggttaaggttctcagtgacac

SEQ ID NO: 3965 - DNA, 50 bp, Homo sapiens
atttttaaatggctttaccaaacattgtcagtacctttacgtgttagaag

SEQ ID NO: 3966 - DNA, 50 bp, Homo sapiens
ctttccacagcaattgttttgtacgaggggccttacagcgcggtccactt

SEQ ID NO: 3967 - DNA, 50 bp, Homo sapiens
ttctacagcacgatgcctggatctactgacctgtcaaccacgaatcttga

SEQ ID NO: 3968 - DNA, 50 bp, Homo sapiens
gaaacagcaacaagcaaacaggatctcagcattaccaacagccagcacta

SEQ ID NO: 3969 - DNA, 50 bp, Homo sapiens
tgagcctgaacttttttagcaaattattattctcagtttccattacctgt

SEQ ID NO: 3970 - DNA, 50 bp, Homo sapiens
ccttccaaagcggtcacctgatagggaagtcttacggctaggaagttaca

SEQ ID NO: 3971 - DNA, 50 bp, Homo sapiens
gaatggtggggagaaaaaaggggggcacagtcatgatcggctcttataat

SEQ ID NO: 3972 - DNA, 50 bp, Homo sapiens
gtcacataatccggggacccaaagaaagttctccagagtggtttcacgag

SEQ ID NO: 3973 - DNA, 50 bp, Homo sapiens
acaacaacacatcacgtaaccacaacacgcataaacagcaaatcatccta

SEQ ID NO: 3974 - DNA, 50 bp, Homo sapiens
cagaacaccaacaagcagggacggaagccgaccgagcaaacagcgaaggg

SEQ ID NO: 3975 - DNA, 50 bp, Homo sapiens
gtggacggcctgggaatgtgccccccggtgtaacatcgagcccacaatgg

SEQ ID NO: 3976 - DNA, 50 bp, Homo sapiens
aggattaggagagggtcacagaacagaaagcagattacacttgggatgga

SEQ ID NO: 3977 - DNA, 50 bp, Homo sapiens
ctctgtttgtctggccgcctccgtgatcaaaccgtgtcgtcggcgtgttc

SEQ ID NO: 3978 - DNA, 50 bp, Homo sapiens
ggcttggacattgctctcaagaagattaagaaccctggaggaacactagg

SEQ ID NO: 3979 - DNA, 50 bp, Homo sapiens
tgtacagctaaatttctccaaagcactttttcaaaaccaaaaaagaaaaa

SEQ ID NO: 3980 - DNA, 50 bp, Homo sapiens
tttgcacactgaacacttacagatgtggcagatgtgaaatttgtcatcaa

SEQ ID NO: 3981 - DNA, 50 bp, Homo sapiens
acagagagtcacccgcgagtacgaaacaggcacatttttagaaactcaca

SEQ ID NO: 3982 - DNA, 50 bp, Homo sapiens
aggttcttaccaccacttttgtgcccatctttcccttcgttcccaatgtg

SEQ ID NO: 3983 - DNA, 50 bp, Homo sapiens
ccggggtggccctctcaaatttggcatggggtcctctttcaatgttgtgg

SEQ ID NO: 3984 - DNA, 50 bp, Homo sapiens
cacgagcggctggaggacacccattttgtgcagtgcccgtccgtcccttc

SEQ ID NO: 3985 - DNA, 50 bp, Homo sapiens; identical to SEQ ID NO: 834

SEQ ID NO: 3986 - DNA, 50 bp, Homo sapiens
ggtgtgtctcgcggctggcccagtctattctcggtgtttatcttcatcac

SEQ ID NO: 3987 - DNA, 50 bp, Homo sapiens
gacaacggaaactctgtctctaccaccatgtgacagacgcgttgatgcgt

SEQ ID NO: 3988 - DNA, 50 bp, Homo sapiens
caagacacaaacagcacgactcacacagagaaagcaaccatgccgaggag

SEQ ID NO: 3989 - DNA, 50 bp, Homo sapiens
cgcgtcgaacttcgggacattcccgtaaaccacaaacagataaagaatta

SEQ ID NO: 3990 - DNA, 50 bp, Homo sapiens
gcgtaaagtgatcaaaaggccctgaaggggaaaatgataaaacccgtggt

SEQ ID NO: 3991 - DNA, 50 bp, Homo sapiens
agaggaagcgtgtgaatacaacaatctaaaaaggaggagaggtcgagcac

SEQ ID NO: 3992 - DNA, 50 bp, Homo sapiens
acacattccccataccatttcgtgttattcacattccccgtaccatttct

SEQ ID NO: 3993 - DNA, 50 bp, Homo sapiens
taaaaagggggtggcggctgtagtaaggaggagcgagtaatgtatagcac

SEQ ID NO: 3994 - DNA, 50 bp, Homo sapiens
ccatgagcaggcgcaaccataacagttagagacggcacacagcacgacac

SEQ ID NO: 3995 - DNA, 50 bp, Homo sapiens
actcacgcaagagcagggggactataacagaaataaacaagtaaataaat

SEQ ID NO: 3996 - DNA, 50 bp, Homo sapiens
tacacaggcagctatgcggatcatcagacgagcacatattctaacagaga

SEQ ID NO: 3997 - DNA, 50 bp, Homo sapiens
cgtcgccgtaggacgcctccgtcgtcgtctggtctgtctcctgcatcgag

SEQ ID NO: 3998 - DNA, 50 bp, Homo sapiens
aaaggcaagagtccggggtggcagaagagtgaaaaatgaaagagagaagg

SEQ ID NO: 3999 - DNA, 50 bp, Homo sapiens
ttctgcccagagtgtatttgtgaagagtctcttatattatgttttgtgga

SEQ ID NO: 4000 - DNA, 50 bp, Homo sapiens
gtgcgaatgtggagtgttttacattgatctttgctaatgaattagcatca

SEQ ID NO: 4001 - DNA, 50 bp, Homo sapiens
cattacgcatattggtaagacgcaaaatgagacagatcgacactgggacg

SEQ ID NO: 4002 - DNA, 50 bp, Homo sapiens
cacaacgggtcttaatgacgacggaaagatacatccatcggtatgaacgc

SEQ ID NO: 4003 - DNA, 50 bp, Homo sapiens
accagcaatccgcagcagagtcataagtggggtaggtgatatgtactaac

SEQ ID NO: 4004 - DNA, 50 bp, Homo sapiens
gaaaaaacaagctaacaaacacacacgcccacaccaacatgccagaacgc

SEQ ID NO: 4005 - DNA, 50 bp, Homo sapiens
tgaacatgggtgggtttgatcacgaggattccgctgaaaagattagaggg

SEQ ID NO: 4006 - DNA, 50 bp, Homo sapiens
cgcgttcataacggcgtcgactgttcttgtgctgctgttatctatactat

SEQ ID NO: 4007 - DNA, 50 bp, Homo sapiens
gggaccagactacacggaataccagagttgaagaaaattaagatttaagc

SEQ ID NO: 4008 - DNA, 50 bp, Homo sapiens
tatactgagagtgaaggtctgggtgccaacttgagacaggtggtctagga

SEQ ID NO: 4009 - DNA, 50 bp, Homo sapiens
cccctggttttctcgttctgcctcctttggacctgtgtttgttttctgct

SEQ ID NO: 4010 - DNA, 50 bp, Homo sapiens
cccttagaatggttactgcccttgaattaacttgacacaacttgggttgg

SEQ ID NO: 4011 - DNA, 50 bp, Homo sapiens
cgaataatccctatttgattacctcagaaaagttttgtcttccgccaagg

SEQ ID NO: 4012 - DNA, 50 bp, Homo sapiens
ttggaccccagggtaaggcggatattggttgggacgttcggggagtgtat

SEQ ID NO: 4013 - DNA, 50 bp, Homo sapiens
aattacgttcggaggtatataaaaagggatcggcgcagtggatagggggt

SEQ ID NO: 4014 - DNA, 50 bp, Homo sapiens
ggagatccacagtgatctcaggccctggaccggaaaaggcagcaagatca

SEQ ID NO: 4015 - DNA, 50 bp, Homo sapiens
aagacgagtacaccaagaccaaagagcgccaacgagcacgaccgagtgaa

SEQ ID NO: 4016 - DNA, 50 bp, Homo sapiens
aacgccgactagacgtcacaaagacttaataagaaacacactgatatcca

SEQ ID NO: 4017 - DNA, 50 bp, Homo sapiens
cgcaacattatccatttaaacccctgcataacccattaccaaagccctct

SEQ ID NO: 4018 - DNA, 50 bp, Homo sapiens
ggcaccccaatccccggcaaaaacatttgttaacctcttgggaatttctt

SEQ ID NO: 4019 - DNA, 50 bp, Homo sapiens
ctcgtctgcaccggagtctcacaaatttagcatctgggtcttgagcatta

SEQ ID NO: 4020 - DNA, 50 bp, Homo sapiens
ccctccggggtctctatacccacaaccttctatcactcaatcagttggta

SEQ ID NO: 4021 - DNA, 50 bp, Homo sapiens
aacaagatagagagaagacgaagatcgacacagacaaacaaccacaaccg

SEQ ID NO: 4022 - DNA, 50 bp, Homo sapiens
tgttgggacccctcatctcacgggtcatttccaccactaaacgccctttt

SEQ ID NO: 4023 - DNA, 50 bp, Homo sapiens
ccctgaaatcctaaattccgtcacccctccaacatgaccataaaagtccc

SEQ ID NO: 4024 - DNA, 50 bp, Homo sapiens
gaccacgttatgtgcctgacttcgaggacaccctctctggtttggtattt

SEQ ID NO: 4025 - DNA, 49 bp, Homo sapiens
tctcctttcagttcctttgtaggatttctggccttgaggatagtcttca

SEQ ID NO: 4026 - DNA, 50 bp, Homo sapiens
tctcatcaacatttgactctcagaagagcctccatttgccctttctctct

SEQ ID NO: 4027 - DNA, 50 bp, Homo sapiens
gcagagcagaccttattacgcacaattgccggtaacatgtaacaccagtt

SEQ ID NO: 4028 - DNA, 50 bp, Homo sapiens
attgggcatggttggtccaatgcctcacatggccgggataacaggacgca

SEQ ID NO: 4029 - DNA, 50 bp, Homo sapiens
caaagggtgtaattccacattgacactcctgtcatgcggtgggcgggaac

SEQ ID NO: 4030 - DNA, 50 bp, Homo sapiens
ctagctcactagttgtgcctatatgccacaccgggggacccaacaagggt

SEQ ID NO: 4031 - DNA, 50 bp, Homo sapiens
atactgtgtgatttgcccttgctgtccaaccctgttcttgctgccattta

SEQ ID NO: 4032 - DNA, 50 bp, Homo sapiens
gtggcctgaagtgacccattctatgaattgttaattaaggtgccaaaaaa

SEQ ID NO: 4033 - DNA, 50 bp, Homo sapiens
gggtttgagacttgggtatggaaacagaaccggaaattgtgtgctctggt

SEQ ID NO: 4034 - DNA, 50 bp, Homo sapiens
atttctattatggaatccctggggttcagaatgtaactttgtacatgaga

SEQ ID NO: 4035 - DNA, 50 bp, Homo sapiens
gacagtacacctcagggaagggacaaacaaacacgataaatcgacacacg

SEQ ID NO: 4036 - DNA, 50 bp, Homo sapiens
tcagacccagtcttgtggatggaaatgtagtgctcgagtcacattctgct

SEQ ID NO: 4037 - DNA, 50 bp, Homo sapiens
tcctgagccccacacgcccgaagcaataaagagtccactgacttccaaaa

SEQ ID NO: 4038 - DNA, 50 bp, Homo sapiens
acgaatatcgaatctcccacgcggggggtgagacccgaatctgcggctgc

SEQ ID NO: 4039 - DNA, 50 bp, Homo sapiens
agacacacgagcaaaacgacgcagcaagaatcagatagcatagcaaacat

SEQ ID NO: 4040 - DNA, 50 bp, Homo sapiens
gcagtgggacggaacgggtgaagcctgatggctgatgcggcacgatcttg

SEQ ID NO: 4041 - DNA, 50 bp, Homo sapiens
ctttaaatcttagattgctccgcacagataaagagaaccaggattggggc

SEQ ID NO: 4042 - DNA, 50 bp, Homo sapiens
tttatttgggtacttttccccaacacaagtccttttatcccacccttggg

SEQ ID NO: 4043 - DNA, 50 bp, Homo sapiens
aaaagatctcggaaaatagcattttgttaaaaccttggggggtaaaaccc

SEQ ID NO: 4044 - DNA, 50 bp, Homo sapiens
aaccttcatgcaagtggagacgggtagggggttctatggggcattggttg

SEQ ID NO: 4045 - DNA, 50 bp, Homo sapiens
tgtgaaaagctgataagaaaaccatccagaaaaaagctcttcgttttaca

SEQ ID NO: 4046 - DNA, 50 bp, Homo sapiens
tcattataattctgtcctaggaaatcaaattagaacgctccacaagccgg

SEQ ID NO: 4047 - DNA, 50 bp, Homo sapiens
cgcagagctgggccttacaaatgggttccaaatcgggcttctcactcagg

SEQ ID NO: 4048 - DNA, 50 bp, Homo sapiens
tacaactgtaccacactgggttactctagaagtctctggtcggatccttc

SEQ ID NO: 4049 - DNA, 50 bp, Homo sapiens
catagagcacaagagacacatggaccggcacgcgacccgacccaaagcgc

SEQ ID NO: 4050 - DNA, 50 bp, Homo sapiens
tttacctcatttatttggtactttccccacacagtcctttatccacctgg

SEQ ID NO: 4051 - DNA, 50 bp, Homo sapiens
ccatttttagtgggggagaaaactgtcactgtgctggcgaaagaggtcca

SEQ ID NO: 4052 - DNA, 50 bp, Homo sapiens
ccgcaccgattaacggccagagaagcaacaagcaaataaaaagtgggaaa

SEQ ID NO: 4053 - DNA, 50 bp, Homo sapiens
aacttaactcactggcgagaatacagcgtgggacccttcagccactacaa

SEQ ID NO: 4054 - DNA, 50 bp, Homo sapiens
aggacttaacgggaatacgggaataactccaattacttcatctctagggc

SEQ ID NO: 4055 - DNA, 50 bp, Homo sapiens
aaggaggttgctcaccagtagtgcttgttaccaaaatgtcaccaggagtt

SEQ ID NO: 4056 - DNA, 50 bp, Homo sapiens
tgaattaagtgcattatcaattaaccttatggtggttggaatagtgatca

SEQ ID NO: 4057 - DNA, 50 bp, Homo sapiens
aaacacacaggaaaagggcaaagggggcaccaggagaaccgggagacaaa

SEQ ID NO: 4058 - DNA, 50 bp, Homo sapiens
cggagaaacggggccaaaaggttgccgagagacccggcgaaaaggacagg

SEQ ID NO: 4059 - DNA, 50 bp, Homo sapiens
acaaagcatcaaacagcagggagctagtggagaggtctattgtcccagtg

SEQ ID NO: 4060 - DNA, 50 bp, Homo sapiens
gggtgcatgccaagaaagtatggttggaattcctggtacactgaagtgga

SEQ ID NO: 4061 - DNA, 50 bp, Homo sapiens
atgttatcttgggaattagtgtcttgagcctctgtctgttaccgtagttt

SEQ ID NO: 4062 - DNA, 50 bp, Homo sapiens
tgaccgagtaaaaaacatctatcaattacacaaatgaacaagaatgtgag

SEQ ID NO: 4063 - DNA, 50 bp, Homo sapiens
acaagaaatggttgaggcgaatattggaaacacatgggcttaatgctgaa

SEQ ID NO: 4064 - DNA, 50 bp, Homo sapiens
ggtattgatgcttggtttttcctgccagtccgaaattcctgtatttgtca

SEQ ID NO: 4065 - DNA, 50 bp, Homo sapiens
tcatgctacttgtcctggttttgtcattgatactctcatagcccttttga

SEQ ID NO: 4066 - DNA, 50 bp, Homo sapiens
gcctggcggaccggcagcctatatgacggacttcctcattacttaccacg

SEQ ID NO: 4067 - DNA, 50 bp, Homo sapiens
aaactgtttggagaatttaagcactctctgatgggggacaactctatgga

SEQ ID NO: 4068 - DNA, 50 bp, Homo sapiens
tctttgtgcagatacgttcaccacataagtgtgagccatttaaacctggt

SEQ ID NO: 4069 - DNA, 50 bp, Homo sapiens
caccaaagtggagacaaatacatgatctcaaagatacacagtacctactt

SEQ ID NO: 4070 - DNA, 50 bp, Homo sapiens
aataattggtcttttaaacaaacacggaagtttggtggaatcggtcatgt

SEQ ID NO: 4071 - DNA, 50 bp, Homo sapiens
tgttcgtgccttccttctgggttccacaaaggtgggaccttacttatcta

SEQ ID NO: 4072 - DNA, 50 bp, Homo sapiens
agggaaaaacgcagggggttcaaaaactctctcactctatgcagtgtata

SEQ ID NO: 4073 - DNA, 50 bp, Homo sapiens
aagcagctcaatagcagcatagaggattagattaatggaacagcactgca

SEQ ID NO: 4074 - DNA, 50 bp, Homo sapiens
acatatacaaggacacagaggaaaggcgggaacaacgggaagaggttttg

SEQ ID NO: 4075 - DNA, 50 bp, Homo sapiens
tgtggcgattaagagaggtgaagcataactgatttgcaggatatggtttg

SEQ ID NO: 4076 - DNA, 50 bp, Homo sapiens
aaaagccaaaaggtttcatgtagattttagttcactaaagggtgcccaca

SEQ ID NO: 4077 - DNA, 50 bp, Homo sapiens
gcagaactctaattgtacggggtcacagaggcgtgatatggtatcccaaa

SEQ ID NO: 4078 - DNA, 50 bp, Homo sapiens
cttaaccatacagaatgatataactcctgtgcaatgaaggtgataacagt

SEQ ID NO: 4079 - DNA, 50 bp, Homo sapiens
cttcggaggctaggccgccgctccagctttgcacgtttcgatcccaaagg

SEQ ID NO: 4080 - DNA, 50 bp, Homo sapiens
caaagtcaaataactcctcattgtaaacaaactgtgtaactgcccaaagc

SEQ ID NO: 4081 - DNA, 50 bp, Homo sapiens
ccaatcccgatccaaatcataatttgttcttaagtatactgggcaggtcc

SEQ ID NO: 4082 - DNA, 50 bp, Homo sapiens
tccagctcctgttccttggaaaatctccattgtatgtgcattttttaaat

SEQ ID NO: 4083 - DNA, 50 bp, Homo sapiens
aactgatgcctgctagtgctttctgattactcgcattctgtttcttgctt

SEQ ID NO: 4084 - DNA, 50 bp, Homo sapiens
tcaggttgaagtcaagatgacagataaggtgagagtaatgactactccaa

SEQ ID NO: 4085 - DNA, 50 bp, Homo sapiens
tcctaggtagggtttaatccccagtaaaattgccatattgcacatgtctt

SEQ ID NO: 4086 - DNA, 50 bp, Homo sapiens; identical to SEQ ID NO: 2481

SEQ ID NO: 4087 - DNA, 50 bp, Homo sapiens
gaggccctagcatttctccttggataggggaccagagagagcttggaatg

SEQ ID NO: 4088 - DNA, 50 bp, Homo sapiens; identical to SEQ ID NO: 2188

SEQ ID NO: 4089 - DNA, 50 bp, Homo sapiens; identical to SEQ ID NO: 2057

SEQ ID NO: 4090 - DNA, 50 bp, Homo sapiens
tttacctctgtcttggctttcatgttattaaacgtatgcatgtgaagaag

SEQ ID NO: 4091 - DNA, 50 bp, Homo sapiens
gggaagttggtttataagcctttgccaggtgtaactgttgtgaaataccc

SEQ ID NO: 4092 - DNA, 50 bp, Homo sapiens
ccctcccttcagattatgttaactctgagtctgtccaaatgagttcactt

SEQ ID NO: 4093 - DNA, 50 bp, Homo sapiens; identical to SEQ ID NO: 3369

SEQ ID NO: 4094 - DNA, 50 bp, Homo sapiens; identical to SEQ ID NO: 2819

SEQ ID NO: 4095 - DNA, 50 bp, Homo sapiens
tatggccttcaagctcaagtccaaatcctgccatgacctctctgtactct

SEQ ID NO: 4096 - DNA, 50 bp, Homo sapiens
tccatctgtgcataaggagaggaaagttccagggtgtgtatgttttcagg

SEQ ID NO: 4097 - DNA, 50 bp, Homo sapiens
ggaccattccggagcagccccacatacctcactgtctcgtctgtctatgt

SEQ ID NO: 4098 - DNA, 50 bp, Homo sapiens; identical to SEQ ID NO: 3153

SEQ ID NO: 4099 - DNA, 50 bp, Homo sapiens; identical to SEQ ID NO: 2269

SEQ ID NO: 4100 - DNA, 50 bp, Homo sapiens
aaatctattctaacgcaaaaccactaactgaagttcagataatggatggt

SEQ ID NO: 4101 - DNA, 50 bp, Homo sapiens
tgttataaaagaggattttcccaccttgacaccaggcaatgtagttagca

SEQ ID NO: 4102 - DNA, 50 bp, Homo sapiens
accaggatgcaatggatttatttgattcaggggacctgtatttccatgtc

SEQ ID NO: 4103 - DNA, 50 bp, Homo sapiens
aacagaaacagctatggcaacagcatcaccctcagagcatcaccaacttg

SEQ ID NO: 4104 - DNA, 50 bp, Homo sapiens
tatttaacctgagtatagtatttaacgaagcctagaagcacggctgtggg

SEQ ID NO: 4105 - DNA, 50 bp, Homo sapiens; identical to SEQ ID NO: 860

SEQ ID NO: 4106 - DNA, 50 bp, Homo sapiens
atagcaagctgaactgtcctaaggcaggggcgagcacggaacaatggggc

SEQ ID NO: 4107 - DNA, 50 bp, Homo sapiens
tgacaggttcacttctgaggttgctatgagggtgatggaatgtactgcct

SEQ ID NO: 4108 - DNA, 50 bp, Homo sapiens; identical to SEQ ID NO: 2223

SEQ ID NO: 4109 - DNA, 50 bp, Homo sapiens
ttgaaattggtggcttcattctagatgtagcttgtgcagatgtagcagga

SEQ ID NO: 4110 - DNA, 50 bp, Homo sapiens
acttcttatacatttgataaagtaaggcatggttgtggttaatctggttt

SEQ ID NO: 4111 - DNA, 50 bp, Homo sapiens
catgaagaagcaagacgaaaacacacaggagggaaaatcctgggattctt

SEQ ID NO: 4112 - DNA, 50 bp, Homo sapiens
gcctggcttggaccttggcattccgtttgaattccttctaactggaacat

SEQ ID NO: 4113 - DNA, 50 bp, Homo sapiens
gtccactgtcactgtttctctgctgttgcaaatacatggataacacattt

SEQ ID NO: 4114 - DNA, 50 bp, Homo sapiens
ttgtgttgttggaaaaagtcacattgccattaaactttccttgtctgtct

SEQ ID NO: 4115 - DNA, 50 bp, Homo sapiens
cagtagcgacagcgacggcggagacgagggcgtgagtcaggaggagagac

SEQ ID NO: 4116 - DNA, 50 bp, Homo sapiens
agctgccacgggtgagagagcaggaggtatgaattaaaagtctacagcac

SEQ ID NO: 4117 - DNA, 50 bp, Homo sapiens
ctttcctcaaaatctttaagccagaggcagccttcctgccggagtggaca

SEQ ID NO: 4118 - DNA, 50 bp, Homo sapiens
tctgcctcacgtgcactgtggtggccgtgtgctacggctccttctacaat

SEQ ID NO: 4119 - DNA, 50 bp, Homo sapiens
ccatagcccaaggtgacatttcccaccctgtgccgtgttccccaataaaa

SEQ ID NO: 4120 - DNA, 50 bp, Homo sapiens
ggggtatccagaattggttgtaaatactttgcatattgtctgattaaaca

SEQ ID NO: 4121 - DNA, 50 bp, Homo sapiens
gaggctttgccttgcctgcatatttgtttcgctcttactcagtttgggaa

SEQ ID NO: 4122 - DNA, 50 bp, Homo sapiens; identical to SEQ ID NO: 3320

SEQ ID NO: 4123 - DNA, 50 bp, Homo sapiens
ttgcaaaacccagaagctaaaaagtcaataaacagaaagaatgattttga

SEQ ID NO: 4124 - DNA, 50 bp, Homo sapiens; identical to SEQ ID NO: 1636

SEQ ID NO: 4125 - DNA, 50 bp, Homo sapiens
aaaagaagccctaataaaccacccggataataaccctgtctaccatcttt

SEQ ID NO: 4126 - DNA, 50 bp, Homo sapiens
gtgaagattcctgaggatctaacttgcagttggacactatgttacatact

SEQ ID NO: 4127 - DNA, 50 bp, Homo sapiens
agaaggattagcagttcttagtaagtttactgtgtataggaacggtttgt

SEQ ID NO: 4128 - DNA, 50 bp, Homo sapiens
cggctgcctctcttgagaccatctgccaatcacacagtaactattcgggt

SEQ ID NO: 4129 - DNA, 49 bp, Homo sapiens
cccaactgaggaccactgtctacagagtcaggaaatattgtagggagaa

SEQ ID NO: 4130 - DNA, 50 bp, Homo sapiens; identical to SEQ ID NO: 2058

SEQ ID NO: 4131 - DNA, 50 bp, Homo sapiens; identical to SEQ ID NO: 3479

SEQ ID NO: 4132 - DNA, 50 bp, Homo sapiens
ggagccaagtccagatttacactgggagaggtgccagcaactgaataaat

SEQ ID NO: 4133 - DNA, 50 bp, Homo sapiens; identical to SEQ ID NO: 3789

SEQ ID NO: 4134 - DNA, 50 bp, Homo sapiens
taacttcaatgtagttttccatccttcaaataaacatgtctgcccccatg

SEQ ID NO: 4135 - DNA, 50 bp, Homo sapiens
gagtccttttgatttttaacttattccccatgtccctatacttcgtgtgc

SEQ ID NO: 4136 - DNA, 50 bp, Homo sapiens; identical to SEQ ID NO: 2854

SEQ ID NO: 4137 - DNA, 50 bp, Homo sapiens
cagcttcagctaggagtttgtaagcaaggactttgtgacacatttgtccc

SEQ ID NO: 4138 - DNA, 50 bp, Homo sapiens
aattgaaaagtaccaagaagtggaagaagaccaagacccatcatgcccca

SEQ ID NO: 4139 - DNA, 50 bp, Homo sapiens
acttcctagagacttgtttctgagacagttctttgccttcacttccctgc

SEQ ID NO: 4140 - DNA, 50 bp, Homo sapiens
acaactgacctgtctccttcacatagtccatatcaccacaaatcacacaa

SEQ ID NO: 4141 - DNA, 50 bp, Homo sapiens
gctcaggagcgggctgctgagagctaaacccagcaattttctatgatttt

SEQ ID NO: 4142 - DNA, 50 bp, Homo sapiens
aaagaaagccagtatattggtttgaaatatagagatgtgtcccaatttca

SEQ ID NO: 4143 - DNA, 50 bp, Homo sapiens
actggcaggcttatttatctgttgcacttggttagctttaattgttctgt

SEQ ID NO: 4144 - DNA, 50 bp, Homo sapiens; identical to SEQ ID NO: 2256

SEQ ID NO: 4145 - DNA, 50 bp, Homo sapiens
caactgtgctggccgggaggagagcagagacgcagtcctgcccagtgtag

SEQ ID NO: 4146 - DNA, 50 bp, Homo sapiens
cacatggctaaagaaggtttcagaaagaagtggggacagagcagaacttt

SEQ ID NO: 4147 - DNA, 50 bp, Homo sapiens
ccgacatctggttcctacttcagggtcataaagcctaaatagcccacacg

SEQ ID NO: 4148 - DNA, 50 bp, Homo sapiens
ctcatttgtattcaagcctttaacaggagggcaaagaggtgagaatgtgt

SEQ ID NO: 4149 - DNA, 50 bp, Homo sapiens; identical to SEQ ID NO: 1928

SEQ ID NO: 4150 - DNA, 50 bp, Homo sapiens
gcagacactgcttcttacttctgtgctacggatgggaacagagatgacaa

SEQ ID NO: 4151 - DNA, 50 bp, Homo sapiens
ggggaaactggaggcttcaaaactatctttggagcaggaacaagactatt

SEQ ID NO: 4152 - DNA, 50 bp, Homo sapiens
ggggaaggagggtgattatattgctttgtaatggtttgtgatacttgaaa

SEQ ID NO: 4153 - DNA, 50 bp, Homo sapiens
gtacgaatgggaggtcctcgacacctggggaactgcggactatgcggcag

SEQ ID NO: 4154 - DNA, 50 bp, Homo sapiens; identical to SEQ ID NO: 2478

SEQ ID NO: 4155 - DNA, 50 bp, Homo sapiens
tgacctccaccaaagcccatataaggagcggagttgttaaggactgaaga

SEQ ID NO: 4156 - DNA, 50 bp, Homo sapiens
tttctccggactcatcagtaaacctgtagaagtgtcgctttccagccttt

SEQ ID NO: 4157 - DNA, 50 bp, Homo sapiens; identical to SEQ ID NO: 3153

SEQ ID NO: 4158 - DNA, 50 bp, Homo sapiens
aaagttgatactgtgggttatttttgtgaacagcctgatgtttgggacct

SEQ ID NO: 4159 - DNA, 50 bp, Homo sapiens
aacttttacactttttccttccaacacttcttgattggctttgcagaaat

SEQ ID NO: 4160 - DNA, 50 bp, Homo sapiens
acagccaagacttaggttacagggcaacgcactactgttcagctttgaat

SEQ ID NO: 4161 - DNA, 50 bp, Homo sapiens
acgtgtcctgattttgccacaacctggatattgaagctatccaagctttt

SEQ ID NO: 4162 - DNA, 50 bp, Homo sapiens; identical to SEQ ID NO: 2915

SEQ ID NO: 4163 - DNA, 50 bp, Homo sapiens; identical to SEQ ID NO: 923

SEQ ID NO: 4164 - DNA, 50 bp, Homo sapiens
ccaatgacagcctacctattaccaagggctcccctacaactctgaacctt

SEQ ID NO: 4165 - DNA, 50 bp, Homo sapiens
gacaaaccctggagaaatgggagcttggggagaggatgggagtgggcaga

SEQ ID NO: 4166 - DNA, 50 bp, Homo sapiens
gtgtcagtgcccaaaggagggaggttgatggtgcttaacaaacatgaagt

SEQ ID NO: 4167 - DNA, 50 bp, Homo sapiens
tcattgtataaaagctgttatgtgcaacagtgtggagattccttgtctga

SEQ ID NO: 4168 - DNA, 50 bp, Homo sapiens; identical to SEQ ID NO: 4155

SEQ ID NO: 4169 - DNA, 50 bp, Homo sapiens
ttggcttcattacgagagagaaacataacagaggcagtgatggtttcaga

SEQ ID NO: 4170 - DNA, 50 bp, Homo sapiens; identical to SEQ ID NO: 3706

SEQ ID NO: 4171 - DNA, 50 bp, Homo sapiens
agcacattgggagatacatgataaatttctatctgcagttgctatttgca

SEQ ID NO: 4172 - DNA, 50 bp, Homo sapiens
ggcccagcagaagagcctccttcagcagctactgactgaataaccacttt

SEQ ID NO: 4173 - DNA, 50 bp, Human cytomegalovirus
aataatagattagcagaaggaataatccgtgcgaccgagcttgtgcttct

SEQ ID NO: 4174 - DNA, 50 bp, Human cytomegalovirus
acattcaaaagtttgagcgtcttcatgtacgccgttttcggcctcacgag

SEQ ID NO: 4175 - DNA, 50 bp, Human cytomegalovirus
acgaacagaaatctcaaaagacgctgacccgataagtaccgtcacggaga

SEQ ID NO: 4176 - DNA, 50 bp, Human cytomegalovirus
aggaaccagcaagtcaacaaaagactaacaaagaaaaaccatcttggaat

SEQ ID NO: 4177 - DNA, 50 bp, Human cytomegalovirus
ccaacgacacatccacaaaaatcccccatcgactctcacaatcgcatcat

SEQ ID NO: 4178 - DNA, 50 bp, Human cytomegalovirus
cctctggaggcaagagcacccaccctatggtgactagaagcaaggctgac

SEQ ID NO: 4179 - DNA, 50 bp, Human cytomegalovirus
gatgtccgtctacgcgctatcggccatcatcggcatctatctgctctacc

SEQ ID NO: 4180 - DNA, 50 bp, Human cytomegalovirus
ttcgtgggcaccaagtttcgcaagaactacactgtctgctggccgagttt

SEQ ID NO: 4181 - DNA, 50 bp, Human cytomegalovirus
gagatcgacatcgtcatcgaccgacctccgcagcaacccctacccaatcc

SEQ ID NO: 4182 - DNA, 50 bp, Human cytomegalovirus
ctttgagcaggttctcaaggctgtaactaacgtgctgtcgcccgtctttc

SEQ ID NO: 4183 - DNA, 50 bp, Human cytomegalovirus
tcttctgggacgccaacgacatctaccgcatcttcgccgaattggaaggc

SEQ ID NO: 4184 - DNA, 50 bp, Human cytomegalovirus
agagaacaacaaaaccaccacgacgatgaaacaaaacgctcaaccaaaca

SEQ ID NO: 4185 - DNA, 50 bp, Human cytomegalovirus
gagaaaagattgtgcgatctccccctggtttccagcagactcttgccaga

SEQ ID NO: 4186 - DNA, 50 bp, Human cytomegalovirus
catcttctccaccaaccagggtgggttcatgctgcctatctacgagacgg

SEQ ID NO: 4187 - DNA, 50 bp, Homo sapiens
tcccatgttccctttatttgtcttttggttctgctttttgggagattttt

SEQ ID NO: 4188 - DNA, 50 bp, Homo sapiens
tggtgcgcttttgtgtgcggtggaggagttcctaaccctcggcttgtttt

SEQ ID NO: 4189 - DNA, 50 bp, Homo sapiens
gccgttggttggcttaaacttggtttcgtcacttcgggcactttggtttt

SEQ ID NO: 4190 - DNA, 50 bp, Homo sapiens
ctggcctcccctggctctttaagctcccctttggttaaaaactgggtttt

SEQ ID NO: 4191 - DNA, 50 bp, Homo sapiens
aaaaggccaagggtgttgttggggcgtctgtctaatgtggtgggtctttt

SEQ ID NO: 4192 - DNA, 50 bp, Homo sapiens
gctgtaaatctctgtctcatcatccttctcttttgtttccatagcctttt

SEQ ID NO: 4193 - DNA, 50 bp, Homo sapiens
gtgtgtgctggctgagaagccactgtgaattgattcttcttctgaagttt

SEQ ID NO: 4194 - DNA, 50 bp, Homo sapiens
aataagggtgttgccctttgttccctcacataatcgtgaaaggctgcttt

SEQ ID NO: 4195 - DNA, 50 bp, Homo sapiens
ttcctcagtccctgttcataccatctctgcacccacaatcacactgattt

SEQ ID NO: 4196 - DNA, 50 bp, Homo sapiens
gaccacagatatgcactccttacattaacctcagccttgatgtatcattt

SEQ ID NO: 4197 - DNA, 50 bp, Homo sapiens
ccccctgttatgaaaagggttaaacttgaacccacccattttaaaaattt

SEQ ID NO: 4198 - DNA, 50 bp, Homo sapiens
ttatagctaccagaagccaccagggccttagcccagcagtagaaacctct

SEQ ID NO: 4199 - DNA, 50 bp, Homo sapiens
gatcagtagacacacccctcaatgctgcgaagaaaatgaaggccactctt

SEQ ID NO: 4200 - DNA, 50 bp, Homo sapiens
agcagacaatggacaactgtagtttttgaattgacttctatagccatctt

SEQ ID NO: 4201 - DNA, 50 bp, Homo sapiens
tccaccacagtgcatgataattccgacagaacggccttttatttgtacct

SEQ ID NO: 4202 - DNA, 50 bp, Homo sapiens
tgttctctgaactgtctggatgaaccggtcaacggcactcatcatacctt

SEQ ID NO: 4203 - DNA, 50 bp, Homo sapiens
gcttcactctgctttctgtataaagggcagtctgtggtcacgcaagactt

SEQ ID NO: 4204 - DNA, 50 bp, Homo sapiens
agcaaagaccaaattctccttgggaagtgtgggagcaggctgacattatt

SEQ ID NO: 4205 - DNA, 50 bp, Homo sapiens
gtcctttgatagcagaacaagaggctctgtgatcctctggacctcagatt

SEQ ID NO: 4206 - DNA, 50 bp, Homo sapiens
tccacgacatggtacagctcttcactttttcagctttttaaatgtccatt

SEQ ID NO: 4207 - DNA, 50 bp, Homo sapiens
gacaaggcaatgctactgatcacctgaggataatggtgaaggacttttgt

SEQ ID NO: 4208 - DNA, 50 bp, Homo sapiens
tcaatagttgtgaaattcttctcaggctccttaaaccctcgctttgttgt

SEQ ID NO: 4209 - DNA, 50 bp, Homo sapiens
aggcttacgtttatccaaaagcatttcaccttgcacattactgttgttgt

SEQ ID NO: 4210 - DNA, 50 bp, Homo sapiens
acaagcatttagatcataacatggtaaagcctattaccagccaatgttgt

SEQ ID NO: 4211 - DNA, 50 bp, Homo sapiens
tgttttggcatagagctttacttaaaatgctgcttcattttacacattgt

SEQ ID NO: 4212 - DNA, 50 bp, Homo sapiens
tggagctcaattctatgcagttgtgctgatatttcattaagtcactgtgt

SEQ ID NO: 4213 - DNA, 50 bp, Homo sapiens
tttccccttggcctgagtttttataaaatttccattaattggggcagtgt

SEQ ID NO: 4214 - DNA, 50 bp, Homo sapiens
tgcagctaaattcgaagcttttggtctatattgttaattgccattgctgt

SEQ ID NO: 4215 - DNA, 50 bp, Homo sapiens
ggatttggaagatgctttcagaaatatggcataggtttttgtcgaaatgt

SEQ ID NO: 4216 - DNA, 50 bp, Homo sapiens
aaagaaaaattcagcctgaaccctacccttataaaacaggttaattgggt

SEQ ID NO: 4217 - DNA, 50 bp, Homo sapiens
tgtaagtcccatgcccgaatttggagatttgggtttttcttttcaggggt

SEQ ID NO: 4218 - DNA, 50 bp, Homo sapiens
cggattccaaattacttaaagcctttatgggaacacggtagattgtaggt

SEQ ID NO: 4219 - DNA, 50 bp, Homo sapiens
gccttctggcctctgaggcaaaggtcagtgatactgatgggagggtaggt

SEQ ID NO: 4220 - DNA, 50 bp, Homo sapiens
gctcaagatcacctctttgtcatcttgaacaatgtttttctcttctaggt

SEQ ID NO: 4221 - DNA, 50 bp, Homo sapiens
tgtttccacttcatgggatatgactccatcacaatgaaaatgggtccagt

SEQ ID NO: 4222 - DNA, 50 bp, Homo sapiens
ttgtgattgtaaatcatgtatgtacaaatgccatgaaaattaaagccagt

SEQ ID NO: 4223 - DNA, 50 bp, Homo sapiens
tttcccttatgcaccttccagtctttggcaggacatgatttatggacagt

SEQ ID NO: 4224 - DNA, 50 bp, Homo sapiens
tgcactctaccagatttgaacatctagtgaggttcacattcatactaagt

SEQ ID NO: 4225 - DNA, 50 bp, Homo sapiens
tcaactgcagggaatctcctaggaagcggataaatctggcaattggaagt

SEQ ID NO: 4226 - DNA, 50 bp, Homo sapiens
accaccagctatttgtaattccttcttctaaggcatagtgaaaacttgct

SEQ ID NO: 4227 - DNA, 50 bp, Homo sapiens
tcgctttctaactgattccattccaccatgtcagatactcctgggctgct

SEQ ID NO: 4228 - DNA, 50 bp, Homo sapiens
cagcaatgaggggatatttttgatgagctggaatatccaattgaacagct

SEQ ID NO: 4229 - DNA, 50 bp, Homo sapiens
ccccctaagttaaaagctctgtctttttggggtttgccctatgtaaagct

SEQ ID NO: 4230 - DNA, 50 bp, Homo sapiens
gaagcctctactcttgagtctctttcattactggggatgtaaatgttcct

SEQ ID NO: 4231 - DNA, 50 bp, Homo sapiens
acacttgatctcttccttatttctctcagaaaacctgtaggattgtgcct

SEQ ID NO: 4232 - DNA, 50 bp, Homo sapiens
agtagatattttgccggtgtacttggaatacctttcagaagccaaaccct

SEQ ID NO: 4233 - DNA, 50 bp, Homo sapiens
aattccaatcctggtatatagcacctggtattatgggtaccaaaaaccct

SEQ ID NO: 4234 - DNA, 50 bp, Homo sapiens
actgctccaaatatcaaccccatgtaggcaggatgtttgatcttggtact

SEQ ID NO: 4235 - DNA, 50 bp, Homo sapiens
tgttgttggatacgtacttaactggtatgcatcccatgtctttgggtact

SEQ ID NO: 4236 - DNA, 50 bp, Homo sapiens
ttaggattgctcagtttcatcaaggtttgaaggataggcaggctctcact

SEQ ID NO: 4237 - DNA, 50 bp, Homo sapiens
ggccagtctctgtgtgtcttaatcccttgtccttcattaaaagcaaaact

SEQ ID NO: 4238 - DNA, 50 bp, Homo sapiens
gcattcccggtcactccctccctaatctgagcatcactcaagctctttat

SEQ ID NO: 4239 - DNA, 50 bp, Homo sapiens
ctgaatgccaagagcttcaagagtgtgtgtaaataaagccacacctttat

SEQ ID NO: 4240 - DNA, 50 bp, Homo sapiens
cccgaggaggaagacgaatcgttaaacatctgaaagggtcaggtgagtat

SEQ ID NO: 4241 - DNA, 50 bp, Homo sapiens
caaacttgttctgaagacaatttccaaggttgtcagccatgtcaccatat

SEQ ID NO: 4242 - DNA, 50 bp, Homo sapiens
tcaggttcgtgttaaacgctgtatgttaactatgactggaattctgtgat

SEQ ID NO: 4243 - DNA, 50 bp, Homo sapiens
atggagatccagagacgttggttttcaaatggagcaaacagcactgtgat

SEQ ID NO: 4244 - DNA, 50 bp, Homo sapiens
agctttaggctgagggcatggaaactgttacgcttttccttttatgtgat

SEQ ID NO: 4245 - DNA, 50 bp, Homo sapiens
tcactccagaatagaaattagagtataggtaggcagtccaacctctgcat

SEQ ID NO: 4246 - DNA, 50 bp, Homo sapiens
tcagatgccacacttatgagaccctcatccttctgctcactctcttccat

SEQ ID NO: 4247 - DNA, 50 bp, Homo sapiens
ccctgcctttacctctctacttgtagtgttctttcagagcctgctcccat

SEQ ID NO: 4248 - DNA, 50 bp, Homo sapiens
caaaacaagatgtgccagggcctgggggatgggataatttcagagagaat

SEQ ID NO: 4249 - DNA, 50 bp, Homo sapiens
acccaagagggcagcagttgtgtcatccagttcatcttaagaatttcaat

SEQ ID NO: 4250 - DNA, 50 bp, Homo sapiens
ggggtaggaagaggatggaattgagatgtttgagcctcatttacatcaat

SEQ ID NO: 4251 - DNA, 50 bp, Homo sapiens
gctctctgatgctggtggctgttcccccagaatggaagcattgattaaat

SEQ ID NO: 4252 - DNA, 50 bp, Homo sapiens
ggggagaagtgatatggtgaagggaagtggggagtatttgaacacagttg

SEQ ID NO: 4253 - DNA, 50 bp, Homo sapiens
caccatgcctcacttttagcgcagtgtgatcctacacaaattgccctgtg

SEQ ID NO: 4254 - DNA, 50 bp, Homo sapiens
tatggtttttaggctatgcagatattctgttggtttttgagacagctctg

SEQ ID NO: 4255 - DNA, 50 bp, Homo sapiens
ccttcctttctaaggcataagtgcgacgttcgctgctgtgcgtggaactg

SEQ ID NO: 4256 - DNA, 50 bp, Homo sapiens
gagaggaaggcagacaggcagccattttaagagagaagagccagacaatg

SEQ ID NO: 4257 - DNA, 50 bp, Homo sapiens
gttatcaaaggtggaatcggaaacaccaggctcctagtgccacggaaatg

SEQ ID NO: 4258 - DNA, 50 bp, Homo sapiens
aaatgtgcctattgctagagctcctccctctcaacacccagtttccttgg

SEQ ID NO: 4259 - DNA, 50 bp, Homo sapiens
caatcgtcttatctctacagagagaagtggaaaattctttttcaaggggg

SEQ ID NO: 4260 - DNA, 50 bp, Homo sapiens
ctatggaaggcagttggtgggcaaaagtccggtttttacgctttgagggg

SEQ ID NO: 4261 - DNA, 50 bp, Homo sapiens
gtctgatccttagaccgtctcatcacagcaaccctaactgcagagcaggg

SEQ ID NO: 4262 - DNA, 50 bp, Homo sapiens
aatggtaagaaatgccttgtgtgggtggccctccagtccccagtccaggg

SEQ ID NO: 4263 - DNA, 50 bp, Homo sapiens
aacatatccagggaggacaaactctgggctggacaatgtatccacaaggg

SEQ ID NO: 4264 - DNA, 50 bp, Homo sapiens
gcccatggtcctagaattaattcccctaaaaatttttgaaataggggcgg

SEQ ID NO: 4265 - DNA, 50 bp, Homo sapiens
gccaactgcttagaagcccaacacaacccatctggtctcttgaataaagg

SEQ ID NO: 4266 - DNA, 50 bp, Homo sapiens
gagcccttaaaattactgtatctcctctaaagtgtgatttaatggctgcg

SEQ ID NO: 4267 - DNA, 50 bp, Homo sapiens
cttttgctggagactcatcgctttgggaagtgcatttgcttcgtcgtccg

SEQ ID NO: 4268 - DNA, 50 bp, Homo sapiens
cccagttcacagtagagaggtggagcttagtacttcctgctgcccattag

SEQ ID NO: 4269 - DNA, 50 bp, Homo sapiens
ctgggctgtaggtactgctgggtcactgttgctataaatggtcactggag

SEQ ID NO: 4270 - DNA, 50 bp, Homo sapiens
ctttagatgtcccacgtcccttcaagcacatgaaagagctcacactggag

SEQ ID NO: 4271 - DNA, 50 bp, Homo sapiens
gactctggaactcgagcgtgtggctgctgcgccgacagctgaatctagag

SEQ ID NO: 4272 - DNA, 50 bp, Homo sapiens
ccttagagatcgtgacccttcctgcttgcctccctggtgggctctttcag

SEQ ID NO: 4273 - DNA, 50 bp, Homo sapiens
agagtgagaaggcagttccagttttagcacagatttgtttatgtgttcag

SEQ ID NO: 4274 - DNA, 50 bp, Homo sapiens
tctcaagagagaacgccacagcagagagacccaatccgcctaagttgcag

SEQ ID NO: 4275 - DNA, 50 bp, Homo sapiens
aggtttggggaggggtcccagtctgcgatcctttctccctcttcgtgcag

SEQ ID NO: 4276 - DNA, 50 bp, Homo sapiens
cctcagcttccaactctgattccaggacaggatggaaaacctttggacag

SEQ ID NO: 4277 - DNA, 50 bp, Homo sapiens
aatcccttgtaccatgtatacaaatgagacaagtgagcttgacattcaag

SEQ ID NO: 4278 - DNA, 50 bp, Homo sapiens
gctacagcccggaacacaaaagaagacacccatgcaaataccattaaaag

SEQ ID NO: 4279 - DNA, 50 bp, Homo sapiens
attaaccctttattgccctagccagtggggtgggagggagagattgtttc

SEQ ID NO: 4280 - DNA, 50 bp, Homo sapiens
gttatccttaggccaggtctcccacctttgagccggacaaaaccagagtc

SEQ ID NO: 4281 - DNA, 50 bp, Homo sapiens
tgctgctacagttgcaaaacactggagctagagaaaataaagtactgatc

SEQ ID NO: 4282 - DNA, 50 bp, Homo sapiens
cgagagtcttgctgagccaggacttgagtgcctcgaagttttcaatgatc

SEQ ID NO: 4283 - DNA, 50 bp, Homo sapiens
atcaggagagggagataattagttgcttcctccttcacactgtttgaatc

SEQ ID NO: 4284 - DNA, 50 bp, Homo sapiens
ttgccctttcctctcactgccttttatagccaatatcaatgtctctttgc

SEQ ID NO: 4285 - DNA, 50 bp, Homo sapiens
atccctattgccagacacatcattctctccatccagaaagccaactttgc

SEQ ID NO: 4286 - DNA, 50 bp, Homo sapiens
ctctcttcatcttctgattgggattgtgtccagtcctctgcttcttctgc

SEQ ID NO: 4287 - DNA, 50 bp, Homo sapiens
gagggttctagcaacttaatcccattagcatgttagctgaagactactgc

SEQ ID NO: 4288 - DNA, 50 bp, Homo sapiens
gtcccaagggtcagtatattggaggaaagtaaaggagtgaatcagactgc

SEQ ID NO: 4289 - DNA, 50 bp, Homo sapiens
ctggaattactaatgtggaggtgatctgagaactgggaacaaagtagggc

SEQ ID NO: 4290 - DNA, 50 bp, Homo sapiens
tccagggactgacaagagtgagtggtgtcaacctaaagagaaactcaggc

SEQ ID NO: 4291 - DNA, 50 bp, Homo sapiens
cagaactccatagacagcctcactttgtgctcgggggcctgtcccaaggc

SEQ ID NO: 4292 - DNA, 50 bp, Homo sapiens
gcacttctcccggttcatccctctcaagtaatggctcagctaataaaggc

SEQ ID NO: 4293 - DNA, 50 bp, Homo sapiens
tccatctcctttctactgtagcggagactacaagtcccaggatgccccgc

SEQ ID NO: 4294 - DNA, 50 bp, Homo sapiens
ccacattcttgctgtccacatcctgctgggtgaaattgtgttgaagtagc

SEQ ID NO: 4295 - DNA, 50 bp, Homo sapiens
tgactgtcttggtaattttcttccttgttttacttctggaaactgggagc

SEQ ID NO: 4296 - DNA, 50 bp, Homo sapiens
tgactttcaggaatgtcagcattgacctctccttgccactgttactcagc

SEQ ID NO: 4297 - DNA, 50 bp, Homo sapiens
aagtttgtgcagcacattcctgagtgtacgatattgacctgtagcccagc

SEQ ID NO: 4298 - DNA, 50 bp, Homo sapiens; identical to SEQ ID NO: 4297

SEQ ID NO: 4299 - DNA, 50 bp, Homo sapiens
accagacttcaggaagaataaaggtcgccaactcaataaaaccaccaagc

SEQ ID NO: 4300 - DNA, 50 bp, Homo sapiens
acttgccacataaacagttccatcataaaaactcttccccttcttgttcc

SEQ ID NO: 4301 - DNA, 50 bp, Homo sapiens
gcttccttgaaccacccagaaatccactcaaatttggggattgtcattcc

SEQ ID NO: 4302 - DNA, 50 bp, Homo sapiens
gggggtgatgggttaattaaataagtccattcctgggatttgagggggcc

SEQ ID NO: 4303 - DNA, 50 bp, Homo sapiens
atgcccctcgtcctagaattaattcccctaaaaatctttgaaatagggcc

SEQ ID NO: 4304 - DNA, 50 bp, Homo sapiens
tcaaactaagaccagggttgaaaactatggcccagggaccacttccagcc

SEQ ID NO: 4305 - DNA, 50 bp, Homo sapiens
gacgcgcacacaccttgagtgacagcgacctcttctctacaggttttccc

SEQ ID NO: 4306 - DNA, 50 bp, Homo sapiens
atccaagctttaattctgccatctcagaatggtgataaaccatttctccc

SEQ ID NO: 4307 - DNA, 50 bp, Homo sapiens
tacttcattgctattgtaaaccaaaaataaaatttgaagccccctgcccc

SEQ ID NO: 4308 - DNA, 50 bp, Homo sapiens
cttcatcactcaggaaacagaaaaggcttcagaaggagcggccatgcccc

SEQ ID NO: 4309 - DNA, 50 bp, Homo sapiens
agaacccgtattcataaaatttagaccaaaaaggaaggaatcgaaccccc

SEQ ID NO: 4310 - DNA, 50 bp, Homo sapiens
ttttctattttcatctgtcattttcactgcagagcgcacctcccggaccc

SEQ ID NO: 4311 - DNA, 50 bp, Homo sapiens
agactgaaggggttgaaagacccgtagacgctcctttcctcttttagacc

SEQ ID NO: 4312 - DNA, 50 bp, Homo sapiens
ctctgcggccctagagttaatcccatcagccgaggtgaggcacctgttac

SEQ ID NO: 4313 - DNA, 50 bp, Homo sapiens
ccaattccgcagtacagagcattcagcaggtagtggtgaccctgggtgac

SEQ ID NO: 4314 - DNA, 50 bp, Homo sapiens
ggctccagccaccggcagctctgaaagagtttgaagaatttattgttcac

SEQ ID NO: 4315 - DNA, 50 bp, Homo sapiens; identical to SEQ ID NO: 238

SEQ ID NO: 4316 - DNA, 50 bp, Homo sapiens
cactggaacacaacccagccatgaaaaggaagaagctctgactcaggcac

SEQ ID NO: 4317 - DNA, 50 bp, Homo sapiens
catctcatgcgtagcactgatcaatgtgccccagggtgtgtattcgccac

SEQ ID NO: 4318 - DNA, 50 bp, Homo sapiens
caatcagagcgcgagttacaagcgcggtggagtggggaagcgaatgaaac

SEQ ID NO: 4319 - DNA, 50 bp, Homo sapiens
gacattgcacatttttgaacctgtctacagcagcctgggttggtcacaac

SEQ ID NO: 4320 - DNA, 50 bp, Homo sapiens
acactggcagagtccagaaaagcagcagaagaaaaattcagagcaaaaac

SEQ ID NO: 4321 - DNA, 50 bp, Homo sapiens
tttaacgtgcttctgagacagccaccaccgaaaggcacctttagcggtta

SEQ ID NO: 4322 - DNA, 50 bp, Homo sapiens
tcagccaacctgaatctggtatctttacttaaacacagcagttgtagtta

SEQ ID NO: 4323 - DNA, 50 bp, Homo sapiens
aaaaggagacgatgtcaggcaaacactccttaccctgccatttctagtta

SEQ ID NO: 4324 - DNA, 50 bp, Homo sapiens
tcacaatcagtctcagattcccagcagcagagagtgaattgtatgttgta

SEQ ID NO: 4325 - DNA, 50 bp, Homo sapiens
taaagacaatgctatttaagtgcacagttccaggggcgcttgtggctcta

SEQ ID NO: 4326 - DNA, 50 bp, Homo sapiens
gaagaccaagtctacgcctgcaagctctcagaccgggaacatccactcta

SEQ ID NO: 4327 - DNA, 50 bp, Homo sapiens
ctgaagagacagaaagggagacaccaaaactttaatggcagttattccta

SEQ ID NO: 4328 - DNA, 50 bp, Homo sapiens
gccgcccccatgaagccctttcttactgtaagtgctcaagaacaaagata

SEQ ID NO: 4329 - DNA, 50 bp, Homo sapiens
gctagcacgactctgccttgttcctttggagacaattgttatcatcaata

SEQ ID NO: 4330 - DNA, 50 bp, Homo sapiens
attgggaatatagatcatcaacagacacagccctggacgcataaatttga

SEQ ID NO: 4331 - DNA, 50 bp, Homo sapiens
actaacgtatttcatcatggaaggtcctgtggtgatggttttccctggga

SEQ ID NO: 4332 - DNA, 50 bp, Homo sapiens
aagtaatagctccctgtttgtgccttgttagggctagggatgtttaagga

SEQ ID NO: 4333 - DNA, 50 bp, Homo sapiens
agctcctccccttagtgaccccaagtctgtttccctcagctgcataagga

SEQ ID NO: 4334 - DNA, 50 bp, Homo sapiens
ccctcaaatctcccaatctactccagggaaaagacacttcaagtgagaga

SEQ ID NO: 4335 - DNA, 50 bp, Homo sapiens
acatgcaaacagtgacttacttagtgcttctgaaaaatttctgagtcaga

SEQ ID NO: 4336 - DNA, 50 bp, Homo sapiens
aatgcccattggtaagtcaacattgttttccctgaaagtcctgagacaga

SEQ ID NO: 4337 - DNA, 50 bp, Homo sapiens
ccatgtttgctgctgctgttgagtttctgtgctttgggagtataataaga

SEQ ID NO: 4338 - DNA, 50 bp, Homo sapiens
tgtgtttggttgggtgtaatgaggaaaatacctgataaaatgtctgaaga

SEQ ID NO: 4339 - DNA, 50 bp, Homo sapiens
tggataagtgaagacagtaataacattgaagcagtgaaccagtggaaaga

SEQ ID NO: 4340 - DNA, 50 bp, Homo sapiens
agcacaaaaatgttgaagtattaggcccaagctccatgtttggttagtca

SEQ ID NO: 4341 - DNA, 50 bp, Homo sapiens
cgtttaacaataataaaggtgactgcttcatctaaggaatccgagccgca

SEQ ID NO: 4342 - DNA, 50 bp, Homo sapiens
gggcattccaccgaaattcttggggaaatttagtagccttcattttagca

SEQ ID NO: 4343 - DNA, 50 bp, Homo sapiens
tccatgttctgtgcaagaaggagacacattttcagttgaggttcccagca

SEQ ID NO: 4344 - DNA, 50 bp, Homo sapiens
agctcaacactgtggtaggaaaatagccactagaaagaaaataaaaagca

SEQ ID NO: 4345 - DNA, 50 bp, Homo sapiens
gcatctccagggtttagcatcaggacagaggattaagtaaattctttcca

SEQ ID NO: 4346 - DNA, 50 bp, Homo sapiens
gagactacagagccttagcccctttaaagcccttaaagttactacttcca

SEQ ID NO: 4347 - DNA, 50 bp, Homo sapiens
agagcaagtctcagaaataatgctgtatctacactgtcatgtatttgcca

SEQ ID NO: 4348 - DNA, 50 bp, Homo sapiens
tggttctctgatttgtaatgagcacctggatatgtcaattaaaatgccca

SEQ ID NO: 4349 - DNA, 50 bp, Homo sapiens
gcaagactgttcagtattatgttagcattgatataaaaagaagcagacca

SEQ ID NO: 4350 - DNA, 50 bp, Homo sapiens
aatgttcccaaaggccaaatttgttgccaggttttatacgcaggtcacca

SEQ ID NO: 4351 - DNA, 50 bp, Homo sapiens
tgcctattgtgattatcgctatcactacatcccctgactaagggaaacca

SEQ ID NO: 4352 - DNA, 50 bp, Homo sapiens
acaaaattcactgcaggtcggtggaatgatagaatgcattttaaatcaca

SEQ ID NO: 4353 - DNA, 50 bp, Homo sapiens
ggacggttggctgaatggcaacagtgatggaatatttatatttagccaca

SEQ ID NO: 4354 - DNA, 50 bp, Homo sapiens
acattgcacatttaatagctgcaccagacactaagagttcctctcacaca

SEQ ID NO: 4355 - DNA, 50 bp, Homo sapiens
cgcttgtcctgtgagtagctcgtcacctgaggccttgtcgtgaatattaa

SEQ ID NO: 4356 - DNA, 50 bp, Homo sapiens
tggagcaaaccacagtttcatgcccatcgtcctagaattaattcccctaa

SEQ ID NO: 4357 - DNA, 50 bp, Homo sapiens
gggacaacacagtggatttgaaatctgaaggggcattggtggtactggaa

SEQ ID NO: 4358 - DNA, 50 bp, Homo sapiens
acctccatatcttctcgtacttgttcctgctggtctcttagctctccgaa

SEQ ID NO: 4359 - DNA, 50 bp, Homo sapiens
cgaggatggtttcctgatagctttcaaacacctttgccatctcttcgcaa

SEQ ID NO: 4360 - DNA, 50 bp, Homo sapiens
actcctgacagctcatcctgcaaaattaaaatccaaaatttaagtcgcaa

SEQ ID NO: 4361 - DNA, 50 bp, Homo sapiens
gctggatctctgcctaaagtcacggtaggatgagaagtagaaacgagcaa

SEQ ID NO: 4362 - DNA, 50 bp, Homo sapiens
tcagaccataggtgggtgttgtttcttttaagtgtgtgtactgtgtccaa

SEQ ID NO: 4363 - DNA, 50 bp, Homo sapiens
tcatctatgtagcttaatctcatcgacgtttcggttcatttcctgcacaa

SEQ ID NO: 4364 - DNA, 50 bp, Homo sapiens
ttccttttccgctaatcaagagtccagggaggtgggaacagcctcaacaa

SEQ ID NO: 4365 - DNA, 50 bp, Homo sapiens
ccggcagctgtgtttagcccctccagatggaagtttcacttgaatgtaaa

SEQ ID NO: 4366 - DNA, 50 bp, Homo sapiens
acaaaggaatgaagctttatgacagggcacgtgaaatgtttatagtgaaa

SEQ ID NO: 4367 - DNA, 50 bp, Homo sapiens
actaaaggtcacaacccattaacaaccatgaaattggtgttgggaagaaa

SEQ ID NO: 4368 - DNA, 50 bp, Homo sapiens
tgctcaggaaaccaaaaaggatgtctgcatggaggacaaaaaggcacaaa

SEQ ID NO: 4369 - DNA, 50 bp, Homo sapiens
tgagaaccgcgcaccctacccatcggccacgtgaccagtcctttttaaaa

SEQ ID NO: 4370 - DNA, 50 bp, Homo sapiens
gtctttgggtcagtgtcatcattctcttcaagtctggggcttggggaaaa

SEQ ID NO: 4371 - DNA, 50 bp, Homo sapiens
ctccacacaggagaatctcggcgatttacacccacaggctacgcagaaaa

SEQ ID NO: 4372 - DNA, 50 bp, Homo sapiens
gcgctgctcccaaaatctatctgctgtttaatagtttttacctttcaaaa

SEQ ID NO: 4373 - DNA, 50 bp, Homo sapiens
gggttcagggggttttccctttgcccgtttggccctgggtttaataaaaa

SEQ ID NO: 4374 - DNA, 50 bp, Homo sapiens
ccaactcctcacagggcaggctagcgggcaccaggtcgccggggaagtgg

SEQ ID NO: 4375 - DNA, 50 bp, Homo sapiens
cggctgagagcccggtagggcccaggggccaagcgcaggcagaggccgcg

SEQ ID NO: 4376 - DNA, 50 bp, Homo sapiens
cttggggtccagggcacagcggtgccggggacacagcagttccgagggtc

SEQ ID NO: 4377 - DNA, 50 bp, Homo sapiens
agtatggtaattagaaagcatgttagaacatgtggaaaaagggggaaaaa

SEQ ID NO: 4378 - DNA, 50 bp, Homo sapiens
catcagtcctcatcagctgaagtggcttcccaaggatttaaataaatagt

SEQ ID NO: 4379 - DNA, 50 bp, Homo sapiens
agacattgactacagggtaatttctatgattatattatttagaagtatga

SEQ ID NO: 4380 - DNA, 50 bp, Homo sapiens
ccagtgaactgttagcaacaatgcagaagaatctgcatgtaataaactga

SEQ ID NO: 4381 - DNA, 50 bp, Homo sapiens
acttaaatgccttttaatttttgtcgatgtaatagtttaataccagtaaa

SEQ ID NO: 4382 - DNA, 50 bp, Homo sapiens
tttttaattctagcttctttttaaagattatttgggtacctaataaagga

SEQ ID NO: 4383 - DNA, 50 bp, Homo sapiens
caaagcctccacaggagaccccacccagcagcccagcccctacccaggag

SEQ ID NO: 4384 - DNA, 50 bp, Homo sapiens
cgagtgacattggctgacatcacagttgtctgaacctgttgtggctctat

SEQ ID NO: 4385 - DNA, 50 bp, Homo sapiens
tgaattgcttcaaaacctcttccatctcagaagaccagaccctgggaact

SEQ ID NO: 4386 - DNA, 50 bp, Homo sapiens
gctgaagtggcaatagagagagtctgctagaaagacggaagtcaccatct

SEQ ID NO: 4387 - DNA, 50 bp, Homo sapiens
tctactgactatcctagaaatcgctgtcgccttaatccaagcctacgttt

SEQ ID NO: 4388 - DNA, 50 bp, Homo sapiens
gtgtgtgcttagccaaatacagtaactgtgactggcccagggatgttctc

SEQ ID NO: 4389 - DNA, 50 bp, Homo sapiens
gtgagtccaatgtatgctttagaagtaaagacattgaccgtcacagacca

SEQ ID NO: 4390 - DNA, 50 bp, Homo sapiens
ctcaagaaaagacagaagagacagtgatttgggatgagtctactctagga

SEQ ID NO: 4391 - DNA, 50 bp, Homo sapiens
accctatgcccattgtcctgatctgaaaattcttggaaattgttccatgt

SEQ ID NO: 4392 - DNA, 50 bp, Homo sapiens
ttcacagtcttctattgttggaccacttacattgtaccaaatgttttcct

SEQ ID NO: 4393 - DNA, 50 bp, Homo sapiens
attaagcccccgtagcccatcccgcaagttagatacagctatggttaagg

SEQ ID NO: 4394 - DNA, 50 bp, Homo sapiens
ttatattgtagtggtggtatttgctttccgcctgttggctacttcgaccc

SEQ ID NO: 4395 - DNA, 50 bp, Homo sapiens
ttgttctctgtcatgcccacaatccctttctaaggaagactgccctacta

SEQ ID NO: 4396 - DNA, 50 bp, Homo sapiens
actgaggacgaggctgactactactgtcagtcttatgatagcacctatca

SEQ ID NO: 4397 - DNA, 50 bp, Homo sapiens
agatggaggatgaagctgactactactgttactcaacagacagcagtggt

SEQ ID NO: 4398 - DNA, 50 bp, Homo sapiens
catgtcaatgtgtctgttgtcatggcggaggtggacggcacctgctactg

SEQ ID NO: 4399 - DNA, 50 bp, Homo sapiens
gtcaatgtgtctgttgtcatggcggaggtggacggcacctgctactgagc

SEQ ID NO: 4400 - DNA, 50 bp, Homo sapiens
tccaacctccagtttgaggatgaggctgattattactgtgagacctggga

SEQ ID NO: 4401 - DNA, 50 bp, Homo sapiens
gactacaactggcaatcccaactcctgggctagggctttttctacctttt

SEQ ID NO: 4402 - DNA, 50 bp, Homo sapiens
tatttctgtgcgagagttccccctaaacatggcggaggcttcttctacaa

SEQ ID NO: 4403 - DNA, 50 bp, Homo sapiens
tggctaggagaccttgggcagtacctacagtcttgctgtttctgtttcat

SEQ ID NO: 4404 - DNA, 50 bp, Homo sapiens
gtgagctgaacaaatacatcatttaaatctatgctgcactttgagttgct

SEQ ID NO: 4405 - DNA, 50 bp, Homo sapiens
cccgtgtgtttacagcatttccaggtccagagaggttggcagacaagtgc

SEQ ID NO: 4406 - DNA, 50 bp, Homo sapiens
agctgtgggatataagtagtggtcattatgtcttcggaggtggcaccact

SEQ ID NO: 4407 - DNA, 50 bp, Homo sapiens
gccctttgagaaagactttgttcctgaactgctcccttctcttttagggt

SEQ ID NO: 4408 - DNA, 50 bp, Homo sapiens
ggtctggttctagatcagccttttcagtctgccctggcctggtcattaat

SEQ ID NO: 4409 - DNA, 50 bp, Homo sapiens
gaaaaacctggctagagcagagcacaggatgtaaaagggtgggggagaac

SEQ ID NO: 4410 - DNA, 50 bp, Homo sapiens
ggttatctgagcataacagggacagggtgggccacaggatacctctgagg

SEQ ID NO: 4411 - DNA, 50 bp, Homo sapiens
acaagcaggagcacatcgctcttttatgaaagcccttcaacatttaacgt

SEQ ID NO: 4412 - DNA, 50 bp, Homo sapiens
cagggacaccacttatcctgcttccactatagcatgaatcagtgctctct

SEQ ID NO: 4413 - DNA, 50 bp, Homo sapiens
catcgcacacgaatttgaatcatctgctctttggaatcgcctacaccctg

SEQ ID NO: 4414 - DNA, 50 bp, Homo sapiens
tgtatgtaggtgtctgagcttcacaagccttttatagtccattcagcact

SEQ ID NO: 4415 - DNA, 50 bp, Homo sapiens
cgacgacaacggtgtatattattgtgcgaaagatcgggcagatttgactt

SEQ ID NO: 4416 - DNA, 50 bp, Homo sapiens
cggtgagactcagtgaaagccatcagcaaaactacagtaatgcggcacta

SEQ ID NO: 4417 - DNA, 50 bp, Homo sapiens
aagttaaacaagactctgaaagccctaaatcaactagtccgtcggctgca

SEQ ID NO: 4418 - DNA, 50 bp, Homo sapiens
cttgagtggtcctcttctgcctgctgctcatttgtcttgggcaaccattt

SEQ ID NO: 4419 - DNA, 50 bp, Homo sapiens
cccaggaatatacagtacttctgtagtgtccagccattacttagcaaggg

SEQ ID NO: 4420 - DNA, 50 bp, Homo sapiens
tgctctgtctgctggtttgcattgtttctgtctgagttaagagactggca

SEQ ID NO: 4421 - DNA, 50 bp, Homo sapiens
ttcttttctccgttagccacgcagctacctactcccgcttccggttcaaa

SEQ ID NO: 4422 - DNA, 50 bp, Homo sapiens; identical to SEQ ID NO: 846

SEQ ID NO: 4423 - DNA, 50 bp, Homo sapiens
gatgaacagtctgagaggcgaggacacggccttgtttaactgtgcgagtc

SEQ ID NO: 4424 - DNA, 50 bp, Homo sapiens
tactacttgccaggtccaagaacggggcgggtcctgttatcattattaca

SEQ ID NO: 4425 - DNA, 50 bp, Homo sapiens
gctgtgtttttctgtgggtgaaataaaggtttcggagcccgttttagata

SEQ ID NO: 4426 - DNA, 50 bp, Homo sapiens
catttctgtgcgagagtgaagaggggaccctagaggatttcgttgtggga

SEQ ID NO: 4427 - DNA, 50 bp, Homo sapiens
ggactccaggctgaggacgaggctgattattagtgatgctcataaacaag

SEQ ID NO: 4428 - DNA, 50 bp, Homo sapiens
ctcttattgtgcgagagacctcccggaactgccactgaaggtggaggcta

SEQ ID NO: 4429 - DNA, 50 bp, Homo sapiens
ctccctgactatctcgggcctctagcctgaggacgaggctgattattatt

SEQ ID NO: 4430 - DNA, 50 bp, Homo sapiens
aagaactcactgtatctgcaaatgaacagcctgaaaaccgaggacacggc

SEQ ID NO: 4431 - DNA, 50 bp, Homo sapiens
cacggctgtgtttaactctgcgacatgcgggggactatggttcgggggaa

SEQ ID NO: 4432 - DNA, 50 bp, Homo sapiens
tcagggtgattgaaggacacatattgaagtacctagaatgccagaaagtg

SEQ ID NO: 4433 - DNA, 50 bp, Homo sapiens
aacaaaactgtgatttatatcaaataacaatggcttggagggggtatgga

SEQ ID NO: 4434 - DNA, 50 bp, Homo sapiens; identical to SEQ ID NO: 1036

SEQ ID NO: 4435 - DNA, 50 bp, Homo sapiens; identical to SEQ ID NO: 1036

SEQ ID NO: 4436 - DNA, 50 bp, Homo sapiens; identical to SEQ ID NO: 1036

SEQ ID NO: 4437 - DNA, 50 bp, Homo sapiens
tgtggctgtacttaaccttctccaacatacatcctgcattacatgaatgg

SEQ ID NO: 4438 - DNA, 50 bp, Homo sapiens
aagcctttgaagtgcctctgattctatgtaacttgttgcagactggtgtt

SEQ ID NO: 4439 - DNA, 50 bp, Homo sapiens
gcattgacctggaaggagagaagatagagagtggaggctctgaaggagac

SEQ ID NO: 4440 - DNA, 50 bp, Homo sapiens
cagtacagggctggcaagcagtgatctctcaggtatatttatcaataatt

SEQ ID NO: 4441 - DNA, 50 bp, Homo sapiens
caaaccctcctttctgcttgcctcaaacctgccaaatatacccacacttt

SEQ ID NO: 4442 - DNA, 50 bp, Homo sapiens; identical to SEQ ID NO: 562

SEQ ID NO: 4443 - DNA, 50 bp, Homo sapiens
agtgatttgattaactcagggcaaggctgaatatcagagtgtatcgcact

SEQ ID NO: 4444 - DNA, 50 bp, Homo sapiens
gcttccactggaggcttgtattgaccttgtaactatatgttaatctcgtg

SEQ ID NO: 4445 - DNA, 50 bp, Homo sapiens
atgcatgtttaccaaaatggctgtttacagtgcattcagttctgatattt

SEQ ID NO: 4446 - DNA, 50 bp, Homo sapiens
acatgacaggtgtaattagtctgctgagccagctttacccaatgaagggc

SEQ ID NO: 4447 - DNA, 50 bp, Homo sapiens
aacagcaaccaataacggattgtaaagtgtaaaggcacaggttactcatg

SEQ ID NO: 4448 - DNA, 50 bp, Homo sapiens
ccatgccaaggaatggaatttccatcctgagccagttcagttaggtgtca

SEQ ID NO: 4449 - DNA, 50 bp, Homo sapiens
ctagagttcatctctgagctgtaagggtgaccagggggcagggggacgat

SEQ ID NO: 4450 - DNA, 50 bp, Homo sapiens
caagtagacaccagagtcactgtttggttggtgggtgatagtggggtcac

SEQ ID NO: 4451 - DNA, 50 bp, Homo sapiens
tgtcacccttccatgacgcctcctctgtgcatttgagttcactgtttatg

SEQ ID NO: 4452 - DNA, 50 bp, Homo sapiens
ggtaacatgagctatggcagtcggttgtgaaaccacaggaagtgtatggg

SEQ ID NO: 4453 - DNA, 50 bp, Homo sapiens
caaatcgggcaccacctccttcagggcgcatgagaccatattaaattcta

SEQ ID NO: 4454 - DNA, 50 bp, Homo sapiens
cagaactgctttcctatgtttacccaggggacctcctttcagatgaactg

SEQ ID NO: 4455 - DNA, 50 bp, Homo sapiens
agcaataatatctctgttttcatttcagaacattgtgctgtctgtcagca

SEQ ID NO: 4456 - DNA, 50 bp, Homo sapiens
ttacaactacatgatgggcatcgagtttaacccttggatcgggaagtggg

SEQ ID NO: 4457 - DNA, 50 bp, Homo sapiens
aatgtttgagctgaccaagcttctgagattcttaacagaaaaagccatgt

SEQ ID NO: 4458 - DNA, 50 bp, Homo sapiens
acgtcagcttaaaactggaaagaagtcttctggtgtatactgagatttga

SEQ ID NO: 4459 - DNA, 50 bp, Homo sapiens
gcccaaaggagtagctctctgttgttactgttgtgctcttcatggataaa

SEQ ID NO: 4460 - DNA, 50 bp, Homo sapiens
gcaaaaagcccaagagcctgaatttagaccaatctatcatcttcctcctc

SEQ ID NO: 4461 - DNA, 50 bp, Homo sapiens
tggagatgtgataacaactccttatctctttgttggctcatctgaagtgt

SEQ ID NO: 4462 - DNA, 50 bp, Homo sapiens
cttgcagtaaaatgtagcccttcctcctggttgtgcaggagtggccctcg

SEQ ID NO: 4463 - DNA, 50 bp, Homo sapiens
tttctttagcccaagagtggaggctaagctacttacttccaagcctgggt

SEQ ID NO: 4464 - DNA, 50 bp, Homo sapiens
aggcaaagggaacttgaaattagaaaaccccagaaacagtcacaatggct

SEQ ID NO: 4465 - DNA, 50 bp, Homo sapiens
agggtcccttccatagtcctcctgcatcattttcctccaacttgaataaa

SEQ ID NO: 4466 - DNA, 50 bp, Homo sapiens
gccaaccagttcagagtgttcccaaggaattgccacccttactcttcaaa

SEQ ID NO: 4467 - DNA, 50 bp, Homo sapiens
atcccagtctcaaatttcttcatttggaactgatatgtaggccctcatcg

SEQ ID NO: 4468 - DNA, 50 bp, Homo sapiens
tctctcactgttatcatttttgcacaggtggtttcagcagcttgatgcca

SEQ ID NO: 4469 - DNA, 50 bp, Homo sapiens
attgtcatttagactttgaacagctctgggaaatagaagactagggttgt

SEQ ID NO: 4470 - DNA, 50 bp, Homo sapiens; identical to SEQ ID NO: 293

SEQ ID NO: 4471 - DNA, 50 bp, Homo sapiens
ggattcaccgtggccgactcttttccctgctttggtttgtttgaaatcta

SEQ ID NO: 4472 - DNA, 50 bp, Homo sapiens
ccctccacaccatcctccccgatttaaatatagtcactgctacaagtaac

SEQ ID NO: 4473 - DNA, 50 bp, Homo sapiens
ttcatcattgcttgcttgccttcctcccttctgtccgctcttactccctc

SEQ ID NO: 4474 - DNA, 50 bp, Homo sapiens
gcaaactaaccgtgtcaacggggtgagatgttgcatcttataaaattaga

SEQ ID NO: 4475 - DNA, 50 bp, Homo sapiens; identical to SEQ ID NO: 4474

SEQ ID NO: 4476 - DNA, 50 bp, Homo sapiens; identical to SEQ ID NO: 4474

SEQ ID NO: 4477 - DNA, 50 bp, Homo sapiens
agtatctgctttccaggctgaagtgattcattcattattctagtcctgct

SEQ ID NO: 4478 - DNA, 50 bp, Homo sapiens
aagctgtcttctttgttggacaatcagccagaatgataagcaaacctgca

SEQ ID NO: 4479 - DNA, 50 bp, Homo sapiens
ctctcgcggtcgcacgaggatgcttggcacgtaccccctgtacatacttc

SEQ ID NO: 4480 - DNA, 50 bp, Homo sapiens; identical to SEQ ID NO: 4479

SEQ ID NO: 4481 - DNA, 50 bp, Homo sapiens; identical to SEQ ID NO: 4479

SEQ ID NO: 4482 - DNA, 50 bp, Homo sapiens
ctcctgtggattcacatcaaataccagttcagttttgtcattgttctagt

SEQ ID NO: 4483 - DNA, 50 bp, Homo sapiens
ggctcctgattacgatgctttggatgttgccaacaaaattgggatcatct

SEQ ID NO: 4484 - DNA, 50 bp, Homo sapiens
aacgccagcattttgttagaggagttagacttggaaaagttaagggaaga

SEQ ID NO: 4485 - DNA, 50 bp, Homo sapiens
atggggactaagggattaagagtgtgaactaaaaggtaacattttccact

SEQ ID NO: 4486 - DNA, 50 bp, Homo sapiens
actggcgagtatgttctatgttgggcctcctgctgcaaaacaataaacag

SEQ ID NO: 4487 - DNA, 50 bp, Homo sapiens
gctgattaactgtattcccctttcccctatggctgctggtgtaaataaac

SEQ ID NO: 4488 - DNA, 50 bp, Homo sapiens
cccagggtttcatgtctgaggccctcaccaagtgtgagtgacagtataaa

SEQ ID NO: 4489 - DNA, 50 bp, Homo sapiens; identical to SEQ ID NO: 4488

SEQ ID NO: 4490 - DNA, 50 bp, Homo sapiens; identical to SEQ ID NO: 4063

SEQ ID NO: 4491 - DNA, 50 bp, Homo sapiens
acacctctctattttgaagtccctatgtgccctgtaatgtctcgttttaa

SEQ ID NO: 4492 - DNA, 50 bp, Homo sapiens
gggagagctcatgtcagtgaatatagatcattctgttgatacccttcttt

SEQ ID NO: 4493 - DNA, 50 bp, Homo sapiens
ttgaaacttgtaactgagatgctgtagttttttgccatctgtagtgatgt

SEQ ID NO: 4494 - DNA, 50 bp, Homo sapiens
aaagggttttatccactgtcatttcaattggataacattttgtcaagttt

SEQ ID NO: 4495 - DNA, 50 bp, Homo sapiens
tcggaaagaagaagtgggaggatgtgaattttagttctgagtttaccaaa

SEQ ID NO: 4496 - DNA, 50 bp, Homo sapiens
gatcgggaactggctccgttgtgctgaggtcatctttggtcatcagcctc

SEQ ID NO: 4497 - DNA, 50 bp, Homo sapiens
tggtgcttgtgcagcctggcagttcattgtcatctttaataaactaagga

SEQ ID NO: 4498 - DNA, 50 bp, Homo sapiens
agaagtacaagatttcgttcttccttccattaaagtacaatctccctggg

SEQ ID NO: 4499 - DNA, 50 bp, Homo sapiens
tacaagtgaaagctaagatgaacacatttaagttaaatggcagccttgtt

SEQ ID NO: 4500 - DNA, 50 bp, Homo sapiens
aaaaggatgtgacagaagcagagatgaccagaaagcacaggggcagggtt

SEQ ID NO: 4501 - DNA, 50 bp, Homo sapiens
gggttttctataaggggtttcctgctgaacaggggcgtgggattgaatta

SEQ ID NO: 4502 - DNA, 50 bp, Homo sapiens
cctgggaccagggcatattaaaggcttttggcagcaaagtgtcagtgttg

SEQ ID NO: 4503 - DNA, 50 bp, Homo sapiens
tttgtggcttggggctgcctactataaactattgggggttcgtccatttt

SEQ ID NO: 4504 - DNA, 50 bp, Homo sapiens; identical to SEQ ID NO: 746

SEQ ID NO: 4505 - DNA, 50 bp, Homo sapiens
aattcctgaaccgttggatcaccttctgtcagtccatcatctccaccctg

SEQ ID NO: 4506 - DNA, 50 bp, Homo sapiens
cttacgttgggacacctaaattcgccgcgtctgtagaaggcagattcgag

SEQ ID NO: 4507 - DNA, 50 bp, Homo sapiens
aaaaccgtgtctgtcccttcaacagagtcatcgaggaggggtggctgcta

SEQ ID NO: 4508 - DNA, 50 bp, Homo sapiens
aaactgccgggtccccatcttcaaaagagaggaggccctttctccagctt

SEQ ID NO: 4509 - DNA, 50 bp, Homo sapiens
caagaaagcaacttgagccttgggctaatctggctgagtagtcagttata

SEQ ID NO: 4510 - DNA, 50 bp, Homo sapiens
tgtgttctttgagttccccctttacccaaaagtaatttggggaccaaagt

SEQ ID NO: 4511 - DNA, 50 bp, Homo sapiens
gggaaggcaatctgatggggaagttggcaatttctggtttgggtgattta

SEQ ID NO: 4512 - DNA, 50 bp, Homo sapiens
ccagccgtcctcctggggtggaccctagtttaataaagattcaccaagtt

SEQ ID NO: 4513 - DNA, 50 bp, Homo sapiens
catgcaagggcaaaaggcagtgccatgcaagctgtttaaaataaagatgt

SEQ ID NO: 4514 - DNA, 50 bp, Homo sapiens
aggggtgggaggaagcaaaagactctgtacctattttgtatgtgtataat

SEQ ID NO: 4515 - DNA, 50 bp, Homo sapiens
tcaggatgtgagcactcgttgtgtctggatgttacaaatatgggtggttt

SEQ ID NO: 4516 - DNA, 50 bp, Homo sapiens
tgttcacgttgttcacatcccatgtagaaaaacaaagatgccacggagga

SEQ ID NO: 4517 - DNA, 50 bp, Homo sapiens
agccctgcaaaaattcagagtccttgcaaaattgtctaaaatgtcagtgt

SEQ ID NO: 4518 - DNA, 50 bp, Homo sapiens
tgtcatctcaagtcaagtcactggtctgtttgcatttgatacatttttgt

SEQ ID NO: 4519 - DNA, 50 bp, Homo sapiens
gagtgaccacagggatgccacacagctcggatttcagcctctgatgtcag

SEQ ID NO: 4520 - DNA, 50 bp, Homo sapiens
gcctgttgccctttctgtaccatttatttgctcccaatgtttatgataat

SEQ ID NO: 4521 - DNA, 50 bp, Homo sapiens; identical to SEQ ID NO: 4520

SEQ ID NO: 4522 - DNA, 50 bp, Homo sapiens
tcctggatgcctctgaagagagggacagaccgtcagaaactggagagttt

SEQ ID NO: 4523 - DNA, 50 bp, Homo sapiens
acttaaccatataaatgtggaggctatcaacaaagaatgggcttgaaaca

SEQ ID NO: 4524 - DNA, 50 bp, Homo sapiens; identical to SEQ ID NO: 1933

SEQ ID NO: 4525 - DNA, 50 bp, Homo sapiens
aaacagacctaatgctccttgttcctagagtagagtggagggagggtggc

SEQ ID NO: 4526 - DNA, 50 bp, Homo sapiens
gagatagccttgctccggcccccttgaccttcagcaaatcacttctctcc

SEQ ID NO: 4527 - DNA, 50 bp, Homo sapiens
ctgctgcgtctcccttccaaactctggtgctgaataaacccttctgatct

SEQ ID NO: 4528 - DNA, 50 bp, Homo sapiens
cacttggctgcataaatgtggtacaaccattctgtcttgaagggcaggtg

SEQ ID NO: 4529 - DNA, 50 bp, Homo sapiens
cagccaatggacacagtagggcttggtgaatgctgctgagtgaatgagta

SEQ ID NO: 4530 - DNA, 50 bp, Homo sapiens
tgcagaggattgaggcttaattctgagctggccctttccagccaataaat

SEQ ID NO: 4531 - DNA, 50 bp, Homo sapiens
ttgaccttccactagaccatgagcacctgggcggaaagccatatatctta

SEQ ID NO: 4532 - DNA, 50 bp, Homo sapiens
acaagcagacacctgaaacaatcaacgcccaataaaacaaagtaggatga

SEQ ID NO: 4533 - DNA, 50 bp, Homo sapiens
tgaggaagaaagcattttgcatcagcctggagtgaaccatgaacttggat

SEQ ID NO: 4534 - DNA, 50 bp, Homo sapiens
ggaataaggtgttgcctggaatttctggtttgtaaggtggtcactgttct

SEQ ID NO: 4535 - DNA, 50 bp, Homo sapiens
tgaacagatggattaccttttgtcaaagcatcatctcaacactaacttga

SEQ ID NO: 4536 - DNA, 50 bp, Homo sapiens
cccagagttttcagggagtacacaggtagattagtttgaagcattgacct

SEQ ID NO: 4537 - DNA, 50 bp, Homo sapiens; identical to SEQ ID NO: 280

SEQ ID NO: 4538 - DNA, 50 bp, Homo sapiens
ggctgccccagaggacagtgggtggagtggtacctacttattaaatgtct

SEQ ID NO: 4539 - DNA, 50 bp, Homo sapiens
ccgagcaaagatcaaaataaaaagtgacacagcagcttcaccagagcatt

SEQ ID NO: 4540 - DNA, 50 bp, Homo sapiens
tttccttcaagcctagcccttctctcattatttctctctgaccctctccc

SEQ ID NO: 4541 - DNA, 50 bp, Homo sapiens
gggtcagtgttcaagaaggaaagcagttgttgaagctacagaagcccagg

SEQ ID NO: 4542 - DNA, 50 bp, Homo sapiens
tgaagactttccatatcaagagacatggtattgactcaacagtttccagt

SEQ ID NO: 4543 - DNA, 50 bp, Homo sapiens
ggactgtcattcagggaggctaaggagagaggcttgcttgggatatagaa

SEQ ID NO: 4544 - DNA, 50 bp, Homo sapiens
tcacttaaccccaggccattatcatatccagatggtcttcagagttgtct

SEQ ID NO: 4545 - DNA, 50 bp, Homo sapiens
ccactggatggtcatttggcatctccgtatatgtgctctggctcctcagc

SEQ ID NO: 4546 - DNA, 50 bp, Homo sapiens
ctgggccacactgaccctgatacaggcatggcagaagaatgggaatattt

SEQ ID NO: 4547 - DNA, 50 bp, Homo sapiens; identical to SEQ ID NO: 4546

SEQ ID NO: 4548 - DNA, 50 bp, Homo sapiens
tgatagcattggtcttgacaagcaccatagtgacactgaaatggattggt

SEQ ID NO: 4549 - DNA, 50 bp, Homo sapiens
ctgaggatgtagagagaacaggtgggctgtattcacgccattggttggaa

SEQ ID NO: 4550 - DNA, 50 bp, Homo sapiens; identical to SEQ ID NO: 2058

SEQ ID NO: 4551 - DNA, 50 bp, Homo sapiens
tggtccaaaggcaaagttcgggacaagctcaataacttagtcttgtttga

SEQ ID NO: 4552 - DNA, 50 bp, Homo sapiens
caacaggtgtcacactaaggagactttgttcatggctggggacacagccc

SEQ ID NO: 4553 - DNA, 50 bp, Homo sapiens
gcatggaaattcccttcatctggaaccatcagaaacaccctcacactggg

SEQ ID NO: 4554 - DNA, 50 bp, Homo sapiens
ggcagctatggtcaaattgagaaaggtagtgtataaatgtgacaaagaca

SEQ ID NO: 4555 - DNA, 50 bp, Homo sapiens
gctatcttgtctggttttcttgagacctcagatgtgtgttcagcagggct

SEQ ID NO: 4556 - DNA, 50 bp, Homo sapiens
ccgccctgtaccctctttcacctttccctaaagaccctaaatctgaggaa

SEQ ID NO: 4557 - DNA, 50 bp, Homo sapiens
catatgggagaaggccagtgcccaggcatagggttagctcagtttccctc

SEQ ID NO: 4558 - DNA, 50 bp, Homo sapiens
ttaataccaggaacccagcggctctagccactgagcggctaaatgaaata

SEQ ID NO: 4559 - DNA, 50 bp, Homo sapiens
gtggaggggtttaccaccttcctaggtcgttcaaccaggttttgtgagga

SEQ ID NO: 4560 - DNA, 50 bp, Homo sapiens
gcaacccttcagaaaggctttgctcctgctctcagatcagatcaagcatt

SEQ ID NO: 4561 - DNA, 50 bp, Homo sapiens
aacatttggaggaaggtgggaagcagatgactgaggaagggatggactaa

SEQ ID NO: 4562 - DNA, 50 bp, Homo sapiens
tgcccagaaagctcagaaggctaaatgaatattatccctaatacctgcca

SEQ ID NO: 4563 - DNA, 50 bp, Homo sapiens
agaggactcttcgagacattgagaccttctacaacacctccattgaggaa

SEQ ID NO: 4564 - DNA, 50 bp, Homo sapiens; identical to SEQ ID NO: 2128

SEQ ID NO: 4565 - DNA, 50 bp, Homo sapiens
aaactaaaacttcatcttccccaagtgcggggagtacaaggcatggcgta

SEQ ID NO: 4566 - DNA, 50 bp, Homo sapiens
aaaaccttcccataaaatgtaagaaaagctgatgaggctggtgacgttca

SEQ ID NO: 4567 - DNA, 50 bp, Homo sapiens; identical to SEQ ID NO: 641

SEQ ID NO: 4568 - DNA, 50 bp, Homo sapiens
gccacaaaatgttctttgttctttggctccaaaaagactgtcagctttca

SEQ ID NO: 4569 - DNA, 50 bp, Homo sapiens
ctgaggctctccctttctctgtgattggacagttgacagcacccaaactc

SEQ ID NO: 4570 - DNA, 50 bp, Homo sapiens
ccctgtaactcctcactgtactgatttactggcgcatgaaattctattaa

SEQ ID NO: 4571 - DNA, 50 bp, Homo sapiens
cttgagtaaaataaatattgtctttttgtatgtcaagcgggccgccaccg

SEQ ID NO: 4572 - DNA, 50 bp, Homo sapiens
gggagggagggagggaaagcttcctcctaaatcaagcatctttctgttac

SEQ ID NO: 4573 - DNA, 50 bp, Homo sapiens
tcacagatgcatatagacacacatacataatggtactcccaaactgacaa

SEQ ID NO: 4574 - DNA, 50 bp, Homo sapiens
gctgaggactcccgccatgtggccccaggtgccaccaataaaaatcctac

SEQ ID NO: 4575 - DNA, 50 bp, Homo sapiens
caagatgaggatttgggttttctataaggggtttcctgctggacaggggc

SEQ ID NO: 4576 - DNA, 50 bp, Homo sapiens
aaacatggcctttgcttgaaagaaaataccaaggaacaggaaactgatca

SEQ ID NO: 4577 - DNA, 50 bp, Homo sapiens; identical to SEQ ID NO: 52

SEQ ID NO: 4578 - DNA, 50 bp, Homo sapiens
ggaccaaaggctgattcttggagatttaactccccacaggcaatgggttt

SEQ ID NO: 4579 - DNA, 50 bp, Homo sapiens
aatatttgtttaatccccagttcgcctggagccctccgccttcacattcc

SEQ ID NO: 4580 - DNA, 50 bp, Homo sapiens
aaagtaactggttgtcacctatgagacccttacgtgattgttagttaagt

SEQ ID NO: 4581 - DNA, 50 bp, Homo sapiens
ctcagcctcctcatctgggggagtggaatagtatcctccaggtttttcaa

SEQ ID NO: 4582 - DNA, 50 bp, Homo sapiens
ggcaggaggttctcactgttgtgaaggttgtagacgttgtgtaatgtgtt

SEQ ID NO: 4583 - DNA, 50 bp, Homo sapiens
aagtgggaattttctggaagatggtcagctatgaagtaatagagtttgct

SEQ ID NO: 4584 - DNA, 50 bp, Homo sapiens
gcctgtggcccacctggggtcacttggaaaggatctgaataaaggggacc

SEQ ID NO: 4585 - DNA, 50 bp, Homo sapiens
aaataactggctcccagggtggcggtggtggcagcagtgatcctctgaac

SEQ ID NO: 4586 - DNA, 50 bp, Homo sapiens
tgcccacacccacactctccagcatctggcacaataaacattctctgttt

SEQ ID NO: 4587 - DNA, 50 bp, Homo sapiens; identical to SEQ ID NO: 4586

SEQ ID NO: 4588 - DNA, 50 bp, Homo sapiens
gcacccacctttctgcacataagttatggttttccatcttatctgtcttc

SEQ ID NO: 4589 - DNA, 50 bp, Homo sapiens
aattgtcaaacacagcttgcaatatacatagaaacgtctgtgctcaagga

SEQ ID NO: 4590 - DNA, 50 bp, Homo sapiens
tccagaaacatgacaaggaggactttcctgcctcttggagatcagaggag

SEQ ID NO: 4591 - DNA, 50 bp, Homo sapiens
tcatagttaaatttggtattcgtgggggaagaaatgaccatttcccttgt

SEQ ID NO: 4592 - DNA, 50 bp, Homo sapiens
acacacattcttgctctacccaaagctctggctggcagcactaaatgctt

SEQ ID NO: 4593 - DNA, 50 bp, Homo sapiens; identical to SEQ ID NO: 4592

SEQ ID NO: 4594 - DNA, 50 bp, Homo sapiens
gcagtctccacagtcttcagaagacaaatgctcaggtagtcactgtttcc

SEQ ID NO: 4595 - DNA, 50 bp, Homo sapiens
gcctcccgtgcatctgtactcaccctgtacgacaaacacattacattatt

SEQ ID NO: 4596 - DNA, 50 bp, Homo sapiens
tttcctgttccagaaaaggggctgggatgtctccgtctctgtctcaaatt

SEQ ID NO: 4597 - DNA, 50 bp, Homo sapiens
cggccttctccggtgtcctgtaccaactcttctatttaagagaacctcag

SEQ ID NO: 4598 - DNA, 50 bp, Homo sapiens
gggacgttccatgcccaggttaacaaagaactgtgatatatagagtgtct

SEQ ID NO: 4599 - DNA, 50 bp, Homo sapiens
atgggagatgcctgtgtaatttcgtccgaagctgccaggaagaagaacag

SEQ ID NO: 4600 - DNA, 50 bp, Homo sapiens
cctctccattgaaggattcaggaagaagaaaactcaactcagtgccattt

SEQ ID NO: 4601 - DNA, 50 bp, Homo sapiens
cctcaccttggcaccagacacccaggacttatttaaactctgttgcaagt

SEQ ID NO: 4602 - DNA, 50 bp, Homo sapiens
tgcaaatgtgagtttcctctcctgtccgtgtttgtttagtacttttataa

SEQ ID NO: 4603 - DNA, 50 bp, Homo sapiens
agcaggaattggtggcagattttacaaaagatgtatccttccaatttgga

SEQ ID NO: 4604 - DNA, 50 bp, Homo sapiens
tggatctgccaaaaagaactaacacctgtgagaaataaagtgtatcctga

SEQ ID NO: 4605 - DNA, 50 bp, Homo sapiens
ttcctgtactattgtgttttgagtgtgttttggaaccttcatagaacaca

SEQ ID NO: 4606 - DNA, 50 bp, Homo sapiens
tgacccacttaccttgcatctcacaggtagacagtatataactaacaacc

SEQ ID NO: 4607 - DNA, 50 bp, Homo sapiens; identical to SEQ ID NO: 2312

SEQ ID NO: 4608 - DNA, 50 bp, Homo sapiens
cacgagagtgaagagtgagccagcccttctggagcaggagcaggacagaa

SEQ ID NO: 4609 - DNA, 50 bp, Homo sapiens
aagaaaggcacaaaatgtgctatttttggtcacttgctttatgacgttta

SEQ ID NO: 4610 - DNA, 50 bp, Homo sapiens
gtccctggacacagctcttcattccattgacttagaggcaacaggattga

SEQ ID NO: 4611 - DNA, 50 bp, Homo sapiens
gtaccagctctccaacacggaggcaatcgactgcatcacgcagggacgtg

SEQ ID NO: 4612 - DNA, 50 bp, Homo sapiens
gggggctagttctctcctcacttgtaaacttgtgtagtttcacagaaaaa

SEQ ID NO: 4613 - DNA, 50 bp, Homo sapiens
acagaagaatttgtgtggaagcaggatgtaacagatacaccgtaaaggca

SEQ ID NO: 4614 - DNA, 50 bp, Homo sapiens; identical to SEQ ID NO: 2339

SEQ ID NO: 4615 - DNA, 50 bp, Homo sapiens
cttgaaggaagagggaccagggtgggagagctgattgcagaaaggagaga

SEQ ID NO: 4616 - DNA, 50 bp, Homo sapiens
aaaccattaaagtatacagagaggatgacacagccacagaagaaactcat

SEQ ID NO: 4617 - DNA, 50 bp, Homo sapiens
aacatgcacaaagcagttaattaggcagcctggagaaaaccagagatcca

SEQ ID NO: 4618 - DNA, 50 bp, Homo sapiens
acttccagaaactcatcaaatgaacagacaatgtcaaaactactgtgtct

SEQ ID NO: 4619 - DNA, 50 bp, Homo sapiens
gctttatgggtttggcttgtttttcttgcatggtttggagctgatcgctt

SEQ ID NO: 4620 - DNA, 50 bp, Homo sapiens
ttctttcttggcctcaagttcaatatggagaggattgcttccctgaatcc

SEQ ID NO: 4621 - DNA, 50 bp, Homo sapiens
aactatgtggactggattaaggacaccatagctgccaacagctaaagccc

SEQ ID NO: 4622 - DNA, 50 bp, Homo sapiens
cctgacttcttcacgcgggtagccctctacgtggactggatccgttctac

SEQ ID NO: 4623 - DNA, 50 bp, Homo sapiens
agccagcaggacatgaagttgctattaaatggacttcgtgatttttgttt

SEQ ID NO: 4624 - DNA, 50 bp, Homo sapiens; identical to SEQ ID NO: 2383

SEQ ID NO: 4625 - DNA, 50 bp, Homo sapiens
aacttgtgccacaagagttacaatcaaagtggtctccttagactgaattc

SEQ ID NO: 4626 - DNA, 50 bp, Homo sapiens
aaagcctttaaaaacggctgtcaggtttgatctcagtgtaacaacatggc

SEQ ID NO: 4627 - DNA, 50 bp, Homo sapiens
gaaaatgcgccttaggctgagccaacatgactgtcccccaaactccagtg

SEQ ID NO: 4628 - DNA, 50 bp, Homo sapiens
ccagcttcggttccttccacctcatccggctgctctacgacgagtacatg

SEQ ID NO: 4629 - DNA, 50 bp, Homo sapiens
aagattggtgctcctgataaagcaaagggctaggaatacaatggaaagga

SEQ ID NO: 4630 - DNA, 50 bp, Homo sapiens
tcattggtacacattctgtatgctgctgttttcaagttggcaaattaagc

SEQ ID NO: 4631 - DNA, 50 bp, Homo sapiens
tatcagcaactgtcctcatcagtctccataccccttcagctttcctgagc

SEQ ID NO: 4632 - DNA, 50 bp, Homo sapiens
gcagcttggagaaggcgcaatactccagctccaccgttaccgctaatata

SEQ ID NO: 4633 - DNA, 50 bp, Homo sapiens; identical to SEQ ID NO: 4632

SEQ ID NO: 4634 - DNA, 50 bp, Homo sapiens
cggagcctcaaacaagcattataccttctgtgattatgatttcctctcct

SEQ ID NO: 4635 - DNA, 50 bp, Homo sapiens
atgtttcttggggaatatgttagagaattcccttactcttgattgtggga

SEQ ID NO: 4636 - DNA, 50 bp, Homo sapiens
agagtgatagtcttttgcttttggcaaaactctacttaatccaatgggtt

SEQ ID NO: 4637 - DNA, 50 bp, Homo sapiens
gcctcttgcttggcgtgataaccctgtcatcttcccaaagctcatttatg

SEQ ID NO: 4638 - DNA, 50 bp, Homo sapiens
ttcaactgaccagtcgtggttactccctgctgccaggtccttccccttcc

SEQ ID NO: 4639 - DNA, 50 bp, Homo sapiens
ggctggcacctctcaacgtctgtggactgaatgaataaaccctcctcatc

SEQ ID NO: 4640 - DNA, 50 bp, Homo sapiens
tgggaataacgtccaaaacactctggatcttatatggagaatgacattga

SEQ ID NO: 4641 - DNA, 50 bp, Homo sapiens
agtactgaactcagttccatccgtaaaatatgtaaaggtaagtggcagct

SEQ ID NO: 4642 - DNA, 50 bp, Homo sapiens
gcccaacttcatttccatacttcagggaacagcaaattgaggatttactt

SEQ ID NO: 4643 - DNA, 50 bp, Homo sapiens
ccgttgaatgagtgtgttttgtacataacttcagatacttgtgaacatgc

SEQ ID NO: 4644 - DNA, 50 bp, Homo sapiens
tttcttgggagagtcactccagccctgaagtctgtctctagctcctctgt

SEQ ID NO: 4645 - DNA, 50 bp, Homo sapiens; identical to SEQ ID NO: 2514

SEQ ID NO: 4646 - DNA, 50 bp, Homo sapiens
ttaggagtgattactaattatcaagggcacagttgtggtactgtcattga

SEQ ID NO: 4647 - DNA, 50 bp, Homo sapiens
cggacggaaggacggaaaaagctctatttttatgttaggcttatttcatg

SEQ ID NO: 4648 - DNA, 50 bp, Homo sapiens
agtccctgacagcctagaaataagctgtttgtcttctataaagcattgct

SEQ ID NO: 4649 - DNA, 50 bp, Homo sapiens
gcattttctgcctatgctggaatagctccctcttctggtcctggctcagg

SEQ ID NO: 4650 - DNA, 50 bp, Homo sapiens
agtaagggcacgtagagcatttagagttgtctttcagcattcaatcaggc

SEQ ID NO: 4651 - DNA, 50 bp, Homo sapiens
tgggtcttcagccttacccggaaatacttgtggtttctagatcaccatct

SEQ ID NO: 4652 - DNA, 50 bp, Homo sapiens
acaaggctgacaccaacagagatcgtattgatattgccaatgccagagca

SEQ ID NO: 4653 - DNA, 50 bp, Homo sapiens
agctacttctgccttatggctagggaactgtcatgtctaccatgtattgt

SEQ ID NO: 4654 - DNA, 50 bp, Homo sapiens
tgacttgttttgctccatgtctcctcattcctacacctattttctgctgc

SEQ ID NO: 4655 - DNA, 50 bp, Homo sapiens
ctgtgaaaccgtcagttcggaaggctggttagaacatgtgggagcaacat

SEQ ID NO: 4656 - DNA, 50 bp, Homo sapiens
gcctagtgtgtgtgctttcttaatgtgtgtgccaatggtggatctttgct

SEQ ID NO: 4657 - DNA, 50 bp, Homo sapiens
accaaactggactctcgtgcagaaaatgtagcccattaccacatgtagcc

SEQ ID NO: 4658 - DNA, 50 bp, Homo sapiens; identical to SEQ ID NO: 2585

SEQ ID NO: 4659 - DNA, 50 bp, Homo sapiens; identical to SEQ ID NO: 4482

SEQ ID NO: 4660 - DNA, 50 bp, Homo sapiens
gccaacagaacagaagaaaatgtttcagacggttccccaaatgccggttc

SEQ ID NO: 4661 - DNA, 50 bp, Homo sapiens
ctctagaaaggcccaagtccatgagcacagagggtctgatgaagtttgtg

SEQ ID NO: 4662 - DNA, 50 bp, Homo sapiens
agaccaagaggatattcctcaaagcagaaagtgaagaagaaatttttgcg

SEQ ID NO: 4663 - DNA, 50 bp, Homo sapiens
tggagaagttccagtcctgtctgagccctgaagagccagctcccgaatcc

SEQ ID NO: 4664 - DNA, 50 bp, Homo sapiens
gaagtagactttctgtcctcacaccgaagaacccgagtgagcaggaggga

SEQ ID NO: 4665 - DNA, 50 bp, Homo sapiens
gtgggatttctggggaggctggtgaaggagggcagggttcttttctctac

SEQ ID NO: 4666 - DNA, 50 bp, Homo sapiens
ctatagcttcatgaccgtaacatgtgacctgtgtgctggcaggacgactc

SEQ ID NO: 4667 - DNA, 50 bp, Homo sapiens
atgatccccatgttgcaatatggagtctctgccctgagatcttccccatc

SEQ ID NO: 4668 - DNA, 50 bp, Homo sapiens
tggtcagtctttgttctctgagaaattatgttggaagcagcatactttca

SEQ ID NO: 4669 - DNA, 50 bp, Homo sapiens
ccccaagatacacactggaccctctcttgctgaatgtgggcattaatttt

SEQ ID NO: 4670 - DNA, 50 bp, Homo sapiens
ttctaacacgtcgccttcaactgtaatcacaacatcctgactccgtcatt

SEQ ID NO: 4671 - DNA, 50 bp, Homo sapiens
tttttcattttggagctagttactgggagtaagggagggtggggtggggg

SEQ ID NO: 4672 - DNA, 50 bp, Homo sapiens
gggactgtcttttctgtattcgctgttcaataaacattgagtgagcacct

SEQ ID NO: 4673 - DNA, 50 bp, Homo sapiens; identical to SEQ ID NO: 4672

SEQ ID NO: 4674 - DNA, 50 bp, Homo sapiens
agagaagactcatcttcactatcggcacgtccaacaccacgggcgagtcg

SEQ ID NO: 4675 - DNA, 50 bp, Homo sapiens
aaaccgaaatattgaaatggtgtaatgttgtaccatttgcactgtgagca

SEQ ID NO: 4676 - DNA, 50 bp, Homo sapiens
aggtgggggaaaatgaattttgtatgctgaatttctaagcgcctattgtt

SEQ ID NO: 4677 - DNA, 50 bp, Homo sapiens
gtggatgtggagcaggagagctggatcgtggcatttgtttctgggttctg

SEQ ID NO: 4678 - DNA, 50 bp, Homo sapiens; identical to SEQ ID NO: 1767

SEQ ID NO: 4679 - DNA, 50 bp, Homo sapiens
tgtggttgcctctatgtgctgtttttcctcatacaagtaaacacagaaag

SEQ ID NO: 4680 - DNA, 50 bp, Homo sapiens
cccaactgaggaccactgtctacagagtcaggaaatattgtagggagaaa

SEQ ID NO: 4681 - DNA, 50 bp, Homo sapiens
tgtttgtttctttgtgttgactttgtccctggcaaaattttccactctga

SEQ ID NO: 4682 - DNA, 50 bp, Homo sapiens
aggtgacctggttacttagctaggattggtgatttgtactgctttatggt

SEQ ID NO: 4683 - DNA, 50 bp, Homo sapiens
ccctacccttgccctttaacttattgggactgaataaagaatggagaggc

SEQ ID NO: 4684 - DNA, 50 bp, Homo sapiens
gggcttttgctctggtgtattttattgtcagaaagtccagactcaagagt

SEQ ID NO: 4685 - DNA, 50 bp, Homo sapiens
tggtctgactgtgctatggcctcatcatcaagactttcaatcctatccca

SEQ ID NO: 4686 - DNA, 50 bp, Homo sapiens
gggcgaggcaggccgactgtactaaagtaacgcaataaacgcattatcag

SEQ ID NO: 4687 - DNA, 50 bp, Homo sapiens
gtacgccgctacctggacagcgcgatgcaggagaaagagttcaaatacac

SEQ ID NO: 4688 - DNA, 50 bp, Homo sapiens; identical to SEQ ID NO: 2679

SEQ ID NO: 4689 - DNA, 50 bp, Homo sapiens; identical to SEQ ID NO: 844

SEQ ID NO: 4690 - DNA, 50 bp, Homo sapiens
tgagcttgctcttacgttttaagaggtgccaggggtacatttttgcactg

SEQ ID NO: 4691 - DNA, 50 bp, Homo sapiens
actggacaactttgagtactgacatcattgataaataaactggcttgtgg

SEQ ID NO: 4692 - DNA, 50 bp, Homo sapiens
cgcagggtctacgaagaatagggtgaaaaacctcagaagggaaaactcca

SEQ ID NO: 4693 - DNA, 50 bp, Homo sapiens
aggttttgtctggttgcatataatctttgctctttttaagctctgtgagc

SEQ ID NO: 4694 - DNA, 50 bp, Homo sapiens
ccttgcagaccccaccccctgcctgctctctttccctacaactaggtcag

SEQ ID NO: 4695 - DNA, 50 bp, Homo sapiens; identical to SEQ ID NO: 2719

SEQ ID NO: 4696 - DNA, 50 bp, Homo sapiens
ggagttgcactctgggtgggaagcactcaaataaagatgcgtggtgttaa

SEQ ID NO: 4697 - DNA, 50 bp, Homo sapiens
agcttttgaaaagtggaaaggtcattttgttgcatttccccatttcttgt

SEQ ID NO: 4698 - DNA, 50 bp, Homo sapiens
acctccttattgaagggaagagggaccagcacatgaggctgaggctgagg

SEQ ID NO: 4699 - DNA, 50 bp, Homo sapiens
ggtatctcccacacagcctggcactccaaccgtaccctttatgagacctg

SEQ ID NO: 4700 - DNA, 50 bp, Homo sapiens
aaggatggtcacacaccagcactttatacacttctggctcacaggaaagt

SEQ ID NO: 4701 - DNA, 50 bp, Homo sapiens
atcatcctgccagcagcactcctcccgttcctccagcgtagactacattt

SEQ ID NO: 4702 - DNA, 50 bp, Homo sapiens
agtgctacactcgtctccactgtttgttttacttccccaaaatggacctt

SEQ ID NO: 4703 - DNA, 50 bp, Homo sapiens
acgctactattacgacaaaaacatcatccacaagacagcggggaaacgct

SEQ ID NO: 4704 - DNA, 50 bp, Homo sapiens
tttgagagggtaggagggtgggaaggaaacaaccatgtcatttcagaagt

SEQ ID NO: 4705 - DNA, 50 bp, Homo sapiens
catgctcagtatcattgtggagaaccaagagggcctcttaactgtaacaa

SEQ ID NO: 4706 - DNA, 50 bp, Homo sapiens
gaccggcttcccctgtgagcagcagagcagcacaataaatgaggccactg

SEQ ID NO: 4707 - DNA, 50 bp, Homo sapiens
gaagataccaacctgtgtgccatccacgctaagagagtcaccatcatgcc

SEQ ID NO: 4708 - DNA, 50 bp, Homo sapiens
gttatcactctgcctgtgtatagtcagatagtccatgcgaaggctgtata

SEQ ID NO: 4709 - DNA, 50 bp, Homo sapiens; identical to SEQ ID NO: 2764

SEQ ID NO: 4710 - DNA, 50 bp, Homo sapiens
taagccagcactcacaccactaacatgccctgttcagctactcccactcc

SEQ ID NO: 4711 - DNA, 50 bp, Homo sapiens
ggatgttttctagttgtgcatgaatgctggcaacttagtaagttttgaca

SEQ ID NO: 4712 - DNA, 50 bp, Homo sapiens
cccaaatagtaatgctttagagggaggcagtcatatctctgtgtgcagat

SEQ ID NO: 4713 - DNA, 50 bp, Homo sapiens; identical to SEQ ID NO: 2779

SEQ ID NO: 4714 - DNA, 50 bp, Homo sapiens
ccccttcctcacactgacctgtgttccttccctgttctcttttctattaa

SEQ ID NO: 4715 - DNA, 50 bp, Homo sapiens
aaactctaccaaggaggatgcactgggcctgcctgcggaacagggtatgt

SEQ ID NO: 4716 - DNA, 50 bp, Homo sapiens
cccttggcacgtaaacagactactagacttattgtaggttcgtttgagct

SEQ ID NO: 4717 - DNA, 50 bp, Homo sapiens
caaaggccagccagcttgggagcagcagagaaataaacagcatttctgat

SEQ ID NO: 4718 - DNA, 50 bp, Homo sapiens
gtgagatcggtgcgttctcctgatgttttgccgtggcttggggattgtac

SEQ ID NO: 4719 - DNA, 50 bp, Homo sapiens
gaactttcaggaagaagcatgttttattctggacacaatgaaagaaacca

SEQ ID NO: 4720 - DNA, 50 bp, Homo sapiens
ttgggtgtagatttctgacatcaaaacttggacccttggaaaacaaaagt

SEQ ID NO: 4721 - DNA, 50 bp, Homo sapiens
caacccagcttccctctgctgtgccacggctgttgcttcggttatttaaa

SEQ ID NO: 4722 - DNA, 50 bp, Homo sapiens; identical to SEQ ID NO: 2827

SEQ ID NO: 4723 - DNA, 50 bp, Homo sapiens
acatgagcttctacctccagatgtgccagggtgcatctcaataaacttgg

SEQ ID NO: 4724 - DNA, 50 bp, Homo sapiens
actgaaaagacaactggctacaaagaaggatgtcagaatgtaaggaaact

SEQ ID NO: 4725 - DNA, 50 bp, Homo sapiens
aagttgtggctgttcttgggaaaggggtcaccgtgtctgacaaagtgtaa

SEQ ID NO: 4726 - DNA, 50 bp, Homo sapiens
cccctcgccccgtcacaccgttatgcattactctgtgtctactattatgt

SEQ ID NO: 4727 - DNA, 50 bp, Homo sapiens
gctgtgagagcttgtttctgattgtttcattgttcgcttctgtaattctg

SEQ ID NO: 4728 - DNA, 50 bp, Homo sapiens; identical to SEQ ID NO: 2863

SEQ ID NO: 4729 - DNA, 50 bp, Homo sapiens
tgctcagtttttcagctcctctccactctgctttcccaaatggattctgt

SEQ ID NO: 4730 - DNA, 50 bp, Homo sapiens
atattcactaccaaaagaggcaagaaagtctgtacccatccaaggaaaaa

SEQ ID NO: 4731 - DNA, 50 bp, Homo sapiens
gctgcattacctctagaaacctcaaacaagtagaaacttgcctagacaat

SEQ ID NO: 4732 - DNA, 50 bp, Homo sapiens
tccaagtcgaaatcgctgctgaggctgagatgaagaaagaaaagtccaaa

SEQ ID NO: 4733 - DNA, 50 bp, Homo sapiens
catctcctcccagaacgtcacagtgctcagagacaaactggtcaagtgtg

SEQ ID NO: 4734 - DNA, 50 bp, Homo sapiens
tttgtctgcacttgagttcacttgagtttacatttgaaatgtgcatgttt

SEQ ID NO: 4735 - DNA, 50 bp, Homo sapiens
agttccctttatttcacataagcccaaactgatagacagtaacggtgttt

SEQ ID NO: 4736 - DNA, 50 bp, Homo sapiens
ggagagggtgggacccagttttgcgtggttggtttttattaattatctgg

SEQ ID NO: 4737 - DNA, 50 bp, Homo sapiens
cctctttccctctgtctgtgcttgtgttgttgacctcctgatggcttgtc

SEQ ID NO: 4738 - DNA, 50 bp, Homo sapiens
ctgattcttctgtcctcattgtgaacataaccgtgtagttgaaacagtca

SEQ ID NO: 4739 - DNA, 50 bp, Homo sapiens
tttccaatgtctgccacacaaacgtatgtaaatgtatatacccacacaca

SEQ ID NO: 4740 - DNA, 50 bp, Homo sapiens
tcctgagaaacaacacatttttccccatgaacggtgctgttctgaagtct

SEQ ID NO: 4741 - DNA, 50 bp, Homo sapiens
tattgccaccatccaactcattgagtcttatggttcacatcttgtttcct

SEQ ID NO: 4742 - DNA, 50 bp, Homo sapiens
agtcctatggttcacatcttgtttcctatagaaatgtcctgtattctggg

SEQ ID NO: 4743 - DNA, 50 bp, Homo sapiens
aaaccaggaagaaaaggtatttctttaaatccagaacaatggagccagct

SEQ ID NO: 4744 - DNA, 50 bp, Homo sapiens
aagcagttggactttcacagcagcaaggaattatcttcaagcacagagga

SEQ ID NO: 4745 - DNA, 50 bp, Homo sapiens
cttcagtgtagctctctcctcttcaaataaacatgtctgccctcatggtt

SEQ ID NO: 4746 - DNA, 50 bp, Homo sapiens
ttctctcgtgcaaccagtttgcccattctcttcctattacttgctccagg

SEQ ID NO: 4747 - DNA, 50 bp, Homo sapiens
tgctcttcagaagtttcaccctttttaatctctcagccacaaacctcagt

SEQ ID NO: 4748 - DNA, 50 bp, Homo sapiens
acgtttactggtactgctttctaaatactgttttacccgttttctcttgt

SEQ ID NO: 4749 - DNA, 50 bp, Homo sapiens
gacaaccaattcaaatgattgtgctaacttatttcccctagttgacctgt

SEQ ID NO: 4750 - DNA, 50 bp, Homo sapiens
ggccaagcccagcttaatggctcatgacctggaaataaaatttaggacca

SEQ ID NO: 4751 - DNA, 50 bp, Homo sapiens
ctcaagacagtgtttgacgaagcgatccgagcagtcctctgcccgcctcc

SEQ ID NO: 4752 - DNA, 50 bp, Homo sapiens
ctttttcaccaccgtcttcaatgcccatgagcctttccgccggggtacag

SEQ ID NO: 4753 - DNA, 50 bp, Homo sapiens
acatcgtatttgcggccagcctctacacccagtgaatgccccatgtaaaa

SEQ ID NO: 4754 - DNA, 50 bp, Homo sapiens
tattccttttatatcactgtgtttgaatcgagggggaggggtggtaaccg

SEQ ID NO: 4755 - DNA, 50 bp, Homo sapiens
atgggaatagttgcatatgggaatttaaaccaacatgtggctgagccttt

SEQ ID NO: 4756 - DNA, 50 bp, Homo sapiens
ggcctttgaatgtaaagctgcataagctgttaggttttgttttaaaagga

SEQ ID NO: 4757 - DNA, 50 bp, Homo sapiens
cagtttggccttatgctttatgcagacttgagtgtatgcaggatttcatt

SEQ ID NO: 4758 - DNA, 50 bp, Homo sapiens
cagaccaagagcaccacagactacaactgcccagcttcatctaaatactt

SEQ ID NO: 4759 - DNA, 50 bp, Homo sapiens
gtgggtaaggggctcaagctgtgatgctgctggttttatctctagtgaaa

SEQ ID NO: 4760 - DNA, 50 bp, Homo sapiens
accctcccaggttcctgctgagatatttctcacaatcagacaagagccag

SEQ ID NO: 4761 - DNA, 50 bp, Homo sapiens
gggcagagaaggtggagagtaaagacccaacattactaacaatgatacag

SEQ ID NO: 4762 - DNA, 50 bp, Homo sapiens; identical to SEQ ID NO: 3039

SEQ ID NO: 4763 - DNA, 50 bp, Homo sapiens
aacacatttgaggaataggaggtccgggttttccataatgggtaaaatgg

SEQ ID NO: 4764 - DNA, 50 bp, Homo sapiens
gctgttccacctcccttcagactatctttcagccttctgccagcagtaaa

SEQ ID NO: 4765 - DNA, 50 bp, Homo sapiens
actataagtcattttgagtgttggtgttaagcatgaaacaaacagcagct

SEQ ID NO: 4766 - DNA, 50 bp, Homo sapiens
gctattcacagttctggggaacaaccaaaggaggaggaggacaaagggaa

SEQ ID NO: 4767 - DNA, 50 bp, Homo sapiens; identical to SEQ ID NO: 1116

SEQ ID NO: 4768 - DNA, 50 bp, Homo sapiens
ctatccacagaagctggccttcgccgagtgcctgtgcagaggctgtatcg

SEQ ID NO: 4769 - DNA, 50 bp, Homo sapiens
gtcatatagtccatgtctgtgatgtgagccaagtgatatcctgtagtaca

SEQ ID NO: 4770 - DNA, 50 bp, Homo sapiens
tccactgggtgaatcctccctctcagaaccaataaaatagaattgacctt

SEQ ID NO: 4771 - DNA, 50 bp, Homo sapiens
gagtttctctatcgcattggtcaaccaaaagagacgcattccattgggcg

SEQ ID NO: 4772 - DNA, 50 bp, Homo sapiens; identical to SEQ ID NO: 183

SEQ ID NO: 4773 - DNA, 50 bp, Homo sapiens
tgcgaaattgtggactgttggactgtgattctaagtgggggaaataggct

SEQ ID NO: 4774 - DNA, 50 bp, Homo sapiens
gaacctttctgaaaccagtggcagcccaagttagagcccagcattaagtc

SEQ ID NO: 4775 - DNA, 50 bp, Homo sapiens
ccagaatcttctattcccacttcccatttctcaaatcatttgacctgtcg

SEQ ID NO: 4776 - DNA, 50 bp, Homo sapiens
cctcctggctgtggtggtctttattcacggctactatgcctgaactctat

SEQ ID NO: 4777 - DNA, 50 bp, Homo sapiens
gaaattaagcgatacgaatcccagcttcgggatcttgagcggcagtcaga

SEQ ID NO: 4778 - DNA, 50 bp, Homo sapiens
tcacagtgaccactacagagtactaagaagagaagatcaagggcatgaaa

SEQ ID NO: 4779 - DNA, 50 bp, Homo sapiens
tcttaaagccagaaataatggaggagattgtgatggaaacacgccagagg

SEQ ID NO: 4780 - DNA, 50 bp, Homo sapiens
cttttctttgtgcagcggtctggttatcgtctatccccaggggaatccac

SEQ ID NO: 4781 - DNA, 50 bp, Homo sapiens
ccacgttggggtcactactggagtggatggaggcccttcacatttctggg

SEQ ID NO: 4782 - DNA, 50 bp, Homo sapiens
tgacctttcgtgattatccgcaaatgcaaacagtttcagatctaatggtt

SEQ ID NO: 4783 - DNA, 50 bp, Homo sapiens
cagtcatggagaccatcgctgtgggctgcacctgcatcttctgaatcacc

SEQ ID NO: 4784 - DNA, 50 bp, Homo sapiens
aggtttcttcatgagtcattccaagttttctagtccataccacagtgcct

SEQ ID NO: 4785 - DNA, 50 bp, Homo sapiens
gaggtcgtcttaaaccagagagctactgaatataagaactcttgcagtct

SEQ ID NO: 4786 - DNA, 50 bp, Homo sapiens
gcagtctcccaaggacccaccatgcagaagtgtcaataaaccacaagttc

SEQ ID NO: 4787 - DNA, 50 bp, Homo sapiens
ggagggagcctctgtgcagatgtgctttctttacagtggctgtaaaaagt

SEQ ID NO: 4788 - DNA, 50 bp, Homo sapiens
gatgcttttaaagttgtagcttcgtgctttgtacagttttctttctggtt

SEQ ID NO: 4789 - DNA, 50 bp, Homo sapiens
aatatatgcaattctccctcccccagcccttccctgacccctaagttatt

SEQ ID NO: 4790 - DNA, 50 bp, Homo sapiens
aatctgccaggctatgtgacagtaggaaggaatggtttcccctaacaagc

SEQ ID NO: 4791 - DNA, 50 bp, Homo sapiens
agcacatacattgatagatggggtgtgggaccaacaaaccaaattaaaag

SEQ ID NO: 4792 - DNA, 50 bp, Homo sapiens; identical to SEQ ID NO: 3240

SEQ ID NO: 4793 - DNA, 50 bp, Homo sapiens
ttgtggaaactgtttcagcaaaggttcttgtatagagggaatagggaatt

SEQ ID NO: 4794 - DNA, 50 bp, Homo sapiens
gggggaaggaaggcttcagacttgggggaaggggagattattgcaaattg

SEQ ID NO: 4795 - DNA, 50 bp, Homo sapiens
ctatggaggaattgagggcaagcacccaggactgatgaggtcttaacaaa

SEQ ID NO: 4796 - DNA, 50 bp, Homo sapiens
acaccaaacagttaagtccattctctggtactagctacaaattcggtttc

SEQ ID NO: 4797 - DNA, 50 bp, Homo sapiens
tgcacacagggagagaacatgagtctctcttaatttttatctggttgcta

SEQ ID NO: 4798 - DNA, 50 bp, Homo sapiens
ttcaatggaaaatgaggggtttctccccactgatattttacatagagtca

SEQ ID NO: 4799 - DNA, 50 bp, Homo sapiens
gaccacattgccaataaaaggtccctgaattccaaattctggaagcacgt

SEQ ID NO: 4800 - DNA, 50 bp, Homo sapiens
aggcccaaatcacagaataaaggactaagagtggatttgctgacattcca

SEQ ID NO: 4801 - DNA, 50 bp, Homo sapiens
gctgtcctcaaagtatataatgtttcatgtaccaagacccttttcacagt

SEQ ID NO: 4802 - DNA, 50 bp, Homo sapiens
aagggtatttggtctggttcatatggtcaaatattactgccttggtagca

SEQ ID NO: 4803 - DNA, 50 bp, Homo sapiens
ggggtgccaggaaatgctctctgacctatcaataaaggaaaagcagtgat

SEQ ID NO: 4804 - DNA, 50 bp, Homo sapiens
tgggaagggaaatttggggattatttatcctcctggggacagtttgggga

SEQ ID NO: 4805 - DNA, 50 bp, Homo sapiens
gccacaaaagttccctctcactttcagtaaaaataaataaaacagcagca

SEQ ID NO: 4806 - DNA, 50 bp, Homo sapiens; identical to SEQ ID NO: 923

SEQ ID NO: 4807 - DNA, 50 bp, Homo sapiens
gatacccaggaatttcacaggaacagttctttgctgcctttatcctccaa

SEQ ID NO: 4808 - DNA, 50 bp, Homo sapiens
cccaccctgccgcccgcattataaacacaggagaataatcaatagaataa

SEQ ID NO: 4809 - DNA, 50 bp, Homo sapiens
aaaccaggcccttaaacttcagctagacaaccaatatgctgtgcttgaaa

SEQ ID NO: 4810 - DNA, 50 bp, Homo sapiens
ccagatccacagcaggcacatatctctccaagggatgaccagttttatgc

SEQ ID NO: 4811 - DNA, 50 bp, Homo sapiens
ggacttgaagaccaaagactttgaaatttgcgagctgctcatgtgtgagt

SEQ ID NO: 4812 - DNA, 50 bp, Homo sapiens
gaaacggcataaagatgagaaatgagcctatttgttagtgttcgtgctta

SEQ ID NO: 4813 - DNA, 50 bp, Homo sapiens
cctgccctcgcctggaatcagtgttactgcatctgattaaatgtctccag

SEQ ID NO: 4814 - DNA, 50 bp, Homo sapiens; identical to SEQ ID NO: 606

SEQ ID NO: 4815 - DNA, 50 bp, Homo sapiens
cagagttgacggacactgctcccaaaaggtcattactcagaataaatgta

SEQ ID NO: 4816 - DNA, 50 bp, Homo sapiens
gaacctcaggcagcagttgtgaaggctttgggggaactagacattcttct

SEQ ID NO: 4817 - DNA, 50 bp, Homo sapiens
ggactgagaagcaagatatcaatgtagcagaattgcacttgtgcctcacg

SEQ ID NO: 4818 - DNA, 50 bp, Homo sapiens
caatggttgcaccttatgaccttgagggaaagccagttcatttaagagga

SEQ ID NO: 4819 - DNA, 50 bp, Homo sapiens
gggggaggggaggggttcgtacaggagcaataaaggagaaactgaggtac

SEQ ID NO: 4820 - DNA, 50 bp, Homo sapiens; identical to SEQ ID NO: 4819

SEQ ID NO: 4821 - DNA, 50 bp, Homo sapiens
acttcttggaactttaactcctgccagcccttctaagacccacgagcggg

SEQ ID NO: 4822 - DNA, 50 bp, Homo sapiens
tgttccatcagcatcccctttttgggcgaggagaaaatcgcaactttttc

SEQ ID NO: 4823 - DNA, 50 bp, Homo sapiens
cagactattccccacctgcttcccagcttcacaataaacggctgcgtctc

SEQ ID NO: 4824 - DNA, 50 bp, Homo sapiens; identical to SEQ ID NO: 4823

SEQ ID NO: 4825 - DNA, 50 bp, Homo sapiens
gtctgtgggcctcatgggcattgtggtgggcactgtcttcatcatccaag

SEQ ID NO: 4826 - DNA, 50 bp, Homo sapiens
ctccaaacagagcaacaacaagtacgcggccagcagctacctgagcctga

SEQ ID NO: 4827 - DNA, 50 bp, Homo sapiens
ccaaagtcctcactcagaccagtgcccctccagttcagttgtctatgtat

SEQ ID NO: 4828 - DNA, 50 bp, Homo sapiens
tgtcttccaccctcaagaaactcttgaacaagaccaacaagaaggcagcg

SEQ ID NO: 4829 - DNA, 50 bp, Homo sapiens
gcaggaccagaccctccaggaaaggcaagagactcatgaccaggggacag

SEQ ID NO: 4830 - DNA, 50 bp, Homo sapiens; identical to SEQ ID NO: 3444

SEQ ID NO: 4831 - DNA, 50 bp, Homo sapiens
agcttggtgtataccttgcaggcactagtcctttacagatgacaatgctg

SEQ ID NO: 4832 - DNA, 50 bp, Homo sapiens
aggaagagccacctgcaagatggacacgagccacaagctgcactgtgaac

SEQ ID NO: 4833 - DNA, 50 bp, Homo sapiens
gggtgcagcatggctctaacaagagaagagatcacagaaacgtgaggatc

SEQ ID NO: 4834 - DNA, 50 bp, Homo sapiens
tacattctccctttagcaacctgagtaagagactctctgccactgggctg

SEQ ID NO: 4835 - DNA, 50 bp, Homo sapiens
aactcttggcctcagaggaaggaaaagcaactcaacactcatggtcaagt

SEQ ID NO: 4836 - DNA, 50 bp, Homo sapiens
agggaacaagggagcaagggaacaagggacatctgaacatctaatgtgag

SEQ ID NO: 4837 - DNA, 50 bp, Homo sapiens
gtggcccctggacgggtacaataacacactgtactgatgtcacaactttg

SEQ ID NO: 4838 - DNA, 50 bp, Homo sapiens
cccctaccctgccccaattcaatcctgccaataaatcctgtcttatttgt

SEQ ID NO: 4839 - DNA, 50 bp, Homo sapiens
acacggaagtgaagattcctgaggatctaacttgcagttggacactatgt

SEQ ID NO: 4840 - DNA, 50 bp, Homo sapiens
cggtccttttgccatacacagttacagagatcagtcaaatccataccacc

SEQ ID NO: 4841 - DNA, 50 bp, Homo sapiens
atacctgtgaggactggttgtctctcttcggtgcccttgagtctctgaat

SEQ ID NO: 4842 - DNA, 50 bp, Homo sapiens
tcatctacttcaggaatcagaaaggacactctggacttcagccaacaggt

SEQ ID NO: 4843 - DNA, 50 bp, Homo sapiens
tgcttcttgaaatggatttaacaacagccaggagcttcctgtcagtaacc

SEQ ID NO: 4844 - DNA, 50 bp, Homo sapiens
ccctccccactgctgctgagtctgtctgatgttttggttgtgtgaataaa

SEQ ID NO: 4845 - DNA, 50 bp, Homo sapiens
aggaggaactggggaaggtggtcattcaggggaagaaccaggatgcaggg

SEQ ID NO: 4846 - DNA, 50 bp, Homo sapiens
tgggaaagtgtgagttaatattggacacattttatcctgatccacagtgg

SEQ ID NO: 4847 - DNA, 50 bp, Homo sapiens
ttaaaaggagcacattaaaattctcagaggacttggcaagggccgcacag

SEQ ID NO: 4848 - DNA, 50 bp, Homo sapiens
gcacacgccatctgtgtaacttcaggatctgttctgtttcaccatgtaac

SEQ ID NO: 4849 - DNA, 50 bp, Homo sapiens; identical to SEQ ID NO: 3493

SEQ ID NO: 4850 - DNA, 50 bp, Homo sapiens
aagagaaatatatgccctagagctgctccagcacccttggtttctgattt

SEQ ID NO: 4851 - DNA, 50 bp, Homo sapiens
acagacagactcgatgcccacacagcttcactctttgagcaacatggaat

SEQ ID NO: 4852 - DNA, 50 bp, Homo sapiens
gcacggtgtgttgccacgatttgaccctcaacttctagcagtatatcagt

SEQ ID NO: 4853 - DNA, 50 bp, Homo sapiens
agtgtagttactagtcttttgacatggatgattctgaggaggaagctgtt

SEQ ID NO: 4854 - DNA, 50 bp, Homo sapiens
tcactgccatacaggttttccaatacacaagtgctagaaaatacacacaa

SEQ ID NO: 4855 - DNA, 50 bp, Homo sapiens
ttgcttgccctccatgtcttcctaaagagcagaacttggagtttctcctt

SEQ ID NO: 4856 - DNA, 50 bp, Homo sapiens
agaatgagcctgaatgttggtggtttttgaaatcctgacttggaggtaaa

SEQ ID NO: 4857 - DNA, 50 bp, Homo sapiens
cctcggccctgacaaacggggatcttttacctcactttgcactgattaat

SEQ ID NO: 4858 - DNA, 50 bp, Homo sapiens
tggcttggccttctctttggtgatcccacccccagccatttgcattgctg

SEQ ID NO: 4859 - DNA, 50 bp, Homo sapiens
aatgtttctcttcctgtgagacttactaaagcaacttagtggcaaaaagt

SEQ ID NO: 4860 - DNA, 50 bp, Homo sapiens
agtacttgagtagtctcaataggagtgtatttgtagacagcagtttccct

SEQ ID NO: 4861 - DNA, 50 bp, Homo sapiens
accctagatgagctgtcctgctccagtaacattctttttctaaaatcatt

SEQ ID NO: 4862 - DNA, 50 bp, Homo sapiens; identical to SEQ ID NO: 971

SEQ ID NO: 4863 - DNA, 50 bp, Homo sapiens
atttgagttcctgtgtgtccaaaactgaggcaccatgttctttgaaaaca

SEQ ID NO: 4864 - DNA, 50 bp, Homo sapiens; identical to SEQ ID NO: 4863

SEQ ID NO: 4865 - DNA, 50 bp, Homo sapiens; identical to SEQ ID NO: 4863

SEQ ID NO: 4866 - DNA, 50 bp, Homo sapiens
gtccacagcggaccctgctgatgcctccaccatctatgcagttgtagttt

SEQ ID NO: 4867 - DNA, 50 bp, Homo sapiens
caggctcccatatgtaccccatcccccatactcacctctttccattttga

SEQ ID NO: 4868 - DNA, 50 bp, Homo sapiens
gttgtattggcaagagggaggggtgagagctgttggagaactgagaatga

SEQ ID NO: 4869 - DNA, 50 bp, Homo sapiens
gtaccatcctcaccgtagtcatcatcatcgccgcgcagcaccacgagaac

SEQ ID NO: 4870 - DNA, 50 bp, Homo sapiens; identical to SEQ ID NO: 817

SEQ ID NO: 4871 - DNA, 50 bp, Homo sapiens
atcgctgaatatgttgatcagtgatgagttgggcttaatgcaaagatcct

SEQ ID NO: 4872 - DNA, 50 bp, Homo sapiens
aggctatttacttccatgcttctccttttcttactctatagtggcaacat

SEQ ID NO: 4873 - DNA, 50 bp, Homo sapiens
gggacccccacccagtgagtcaacataggctcatgtcaagtttgaaaata

SEQ ID NO: 4874 - DNA, 50 bp, Homo sapiens
tggtgtgatatgaaccagtccattcacattggaaaaactgatggttttaa

SEQ ID NO: 4875 - DNA, 50 bp, Homo sapiens
tttttatcagcgcctcaatctctactcgaagaagaaagagaagaaacgtt

SEQ ID NO: 4876 - DNA, 50 bp, Homo sapiens
cgctgtcgccttaatccaagcctacgttttcacacttctagtaagcctct

SEQ ID NO: 4877 - DNA, 50 bp, Homo sapiens
ctgtcgggctctgaagcgagctggtttagttgtagaagatgctctgtttg

SEQ ID NO: 4878 - DNA, 50 bp, Homo sapiens
agaagcagaatgcagaaggagaatgaatcctttggatactttcaaggaca

SEQ ID NO: 4879 - DNA, 50 bp, Homo sapiens
tctggcacagtccagctcacaacaacatcaagagcagaatttggagactt

SEQ ID NO: 4880 - DNA, 50 bp, Homo sapiens
gggacttgactttctttctggactgtttgtattgaaacaaagtggtgtca

SEQ ID NO: 4881 - DNA, 50 bp, Homo sapiens; identical to SEQ ID NO: 607

SEQ ID NO: 4882 - DNA, 50 bp, Homo sapiens
agactggtgatttggagtagtttacaagattcctcattcagagtgccctc

SEQ ID NO: 4883 - DNA, 50 bp, Homo sapiens
ttgcctcctccaatctgtgttctcaactgtggttgccacctcattaactt

SEQ ID NO: 4884 - DNA, 50 bp, Homo sapiens
tggaacataccacatgtagaaaggttgaactggtttttcagctataatgc

SEQ ID NO: 4885 - DNA, 50 bp, Homo sapiens
tcacttagcctttctggtttcccttcctgtgcattgcccattttctcatg

SEQ ID NO: 4886 - DNA, 50 bp, Homo sapiens
agccaagaggtatatcgatgatggaaattagccacatgtacactacattt

SEQ ID NO: 4887 - DNA, 50 bp, Homo sapiens
cttcaccgccctacttccacctccgcccagcctgtaatgtttatataagc

SEQ ID NO: 4888 - DNA, 50 bp, Homo sapiens
ctttcagagccagtttgtccaaggccagcatcccgtctgggagatgcacc

SEQ ID NO: 4889 - DNA, 50 bp, Homo sapiens
gccgtatattactgtgcgagagggccggagtggttactcggtatggacgt

SEQ ID NO: 4890 - DNA, 50 bp, Homo sapiens
aggcaaaagcgcctcacgcattcttgttccttgtttgcttcttcggtttt

SEQ ID NO: 4891 - DNA, 50 bp, Homo sapiens
ttagaaagaaaagtcttttattagtactgtgtagggaaggctaaagaaat

SEQ ID NO: 4892 - DNA, 50 bp, Homo sapiens
actgtgcgaaacgtactgtattacgatttttggagtggccgaagtagtcc

SEQ ID NO: 4893 - DNA, 50 bp, Homo sapiens
cagaccctggtgatgctggaaacagttcctcggagtggagaggtttacac

SEQ ID NO: 4894 - DNA, 50 bp, Homo sapiens
gtccagcaacagtgcccagggctctgatgagtctctcatcgcttgtaaag

SEQ ID NO: 4895 - DNA, 50 bp, Homo sapiens
gtgtattactgtgcgagagccttccgccatcccggagtacgtccaatatg

SEQ ID NO: 4896 - DNA, 50 bp, Homo sapiens
cccgtccctcaagagtcgagtcaccatatcagtagacaagtccaagaacc

SEQ ID NO: 4897 - DNA, 50 bp, Homo sapiens
ggctccaggctcaggatgaggctgattattactgctgctcatatacaagc

SEQ ID NO: 4898 - DNA, 50 bp, Homo sapiens
ccctcactgtcaccttcccgagaataccctaagaccaataaatacttcag

SEQ ID NO: 4899 - DNA, 50 bp, Homo sapiens
tgaatgacttctatctgggaatcttgacggtgacctggaaggcagatggt

SEQ ID NO: 4900 - DNA, 50 bp, Homo sapiens; identical to SEQ ID NO: 2269

SEQ ID NO: 4901 - DNA, 50 bp, Homo sapiens
agaacagagatgattacacctacgaagtctgagttatggtgtgagttgga

SEQ ID NO: 4902 - DNA, 50 bp, Homo sapiens
ttcatcattgcttgcttgccttcctccctcctgtccgctctcactcactc

SEQ ID NO: 4903 - DNA, 50 bp, Homo sapiens; identical to SEQ ID NO: 2215

SEQ ID NO: 4904 - DNA, 50 bp, Homo sapiens
tgaagaacgaccaaaattatttgaagaactagggaaacagatccaacagt

SEQ ID NO: 4905 - DNA, 50 bp, Homo sapiens
gtctacatacttcccaggcacccagcatggaaataaagcacccaccactg

SEQ ID NO: 4906 - DNA, 50 bp, Homo sapiens
atacttcccaggcacccagcatggaaataaagcacccaccactgccctgg

SEQ ID NO: 4907 - DNA, 50 bp, Homo sapiens
cccaaggcatcaagcccttctccctgcactcaataaaccctcaataaata

SEQ ID NO: 4908 - DNA, 50 bp, Homo sapiens
aaggcagagatcttgacacctaaggagtctagtttagggctttggttgga

SEQ ID NO: 4909 - DNA, 50 bp, Homo sapiens
gttgacattagaagcaggattctctggtactccctcagaaaatagaatgc

SEQ ID NO: 4910 - DNA, 50 bp, Homo sapiens
ttggagcgtttttgtgtttgagatattagctcaggtcaattccaaagagt

SEQ ID NO: 4911 - DNA, 50 bp, Homo sapiens; identical to SEQ ID NO: 389

SEQ ID NO: 4912 - DNA, 50 bp, Homo sapiens; identical to SEQ ID NO: 392

SEQ ID NO: 4913 - DNA, 50 bp, Homo sapiens; identical to SEQ ID NO: 394

SEQ ID NO: 4914 - DNA, 50 bp, Homo sapiens
tctgttaccacctctaaaatattggggtggaataaagctgggttcttgca

SEQ ID NO: 4915 - DNA, 50 bp, Homo sapiens; identical to SEQ ID NO: 402

SEQ ID NO: 4916 - DNA, 50 bp, Homo sapiens; identical to SEQ ID NO: 403

SEQ ID NO: 4917 - DNA, 50 bp, Homo sapiens; identical to SEQ ID NO: 404

SEQ ID NO: 4918 - DNA, 50 bp, Homo sapiens
gggtaggcagcttgcacccagttctcctttatctcaacttattgtcctgg

SEQ ID NO: 4919 - DNA, 50 bp, Homo sapiens
acttggaacagaagaacttcggcaacgagaacactatctcaagcagaaga

SEQ ID NO: 4920 - DNA, 50 bp, Homo sapiens
gcggtgtccctgagtgagggcaaagttgtaataacacttgttctctcctt

SEQ ID NO: 4921 - DNA, 50 bp, Homo sapiens; identical to SEQ ID NO: 407

SEQ ID NO: 4922 - DNA, 50 bp, Homo sapiens; identical to SEQ ID NO: 408

SEQ ID NO: 4923 - DNA, 50 bp, Homo sapiens
ggctagtggtgttcagagaaataccaaaacgtgtttttatcattgctggt

SEQ ID NO: 4924 - DNA, 50 bp, Homo sapiens
agctgcctcaggaggttcttaacatataggaatgtaattatcagattcaa

SEQ ID NO: 4925 - DNA, 50 bp, Homo sapiens
aggaaaccaagccctcacaggaaagaaagcctgattcaagaaaacaaagt

SEQ ID NO: 4926 - DNA, 50 bp, Homo sapiens; identical to SEQ ID NO: 418

SEQ ID NO: 4927 - DNA, 50 bp, Homo sapiens; identical to SEQ ID NO: 419

SEQ ID NO: 4928 - DNA, 50 bp, Homo sapiens
gccattttccctccagaaacaaaaccaagataatttatcctgaacacggt

SEQ ID NO: 4929 - DNA, 50 bp, Homo sapiens; identical to SEQ ID NO: 421

SEQ ID NO: 4930 - DNA, 50 bp, Homo sapiens
aggaccatagggaagagccagccttgccttttcttatatgattttgttta

SEQ ID NO: 4931 - DNA, 50 bp, Homo sapiens; identical to SEQ ID NO: 424

SEQ ID NO: 4932 - DNA, 50 bp, Homo sapiens; identical to SEQ ID NO: 429

SEQ ID NO: 4933 - DNA, 50 bp, Homo sapiens
tcgttctacgttatctcatctccttgttttcagtgtgcttcaataatgca

SEQ ID NO: 4934 - DNA, 50 bp, Homo sapiens; identical to SEQ ID NO: 432

SEQ ID NO: 4935 - DNA, 50 bp, Homo sapiens
tgcacttactcattagtttttagtttgaactctcctgcgaggtctaatgt

SEQ ID NO: 4936 - DNA, 50 bp, Homo sapiens
tggttcttctgatgagcaagggaacaacactgagaatgaggaggaggagt

SEQ ID NO: 4937 - DNA, 50 bp, Homo sapiens
aagcaagagattgtaaaccgggtacagatccaagagatgagagaggaccc

SEQ ID NO: 4938 - DNA, 50 bp, Homo sapiens
cgtctactgcggaaaagtcaggggaaactgccaaacaaaggaaaatgccc

SEQ ID NO: 4939 - DNA, 50 bp, Homo sapiens
gtgtttgacttcactgctgcgaaatgactgtctcctggctagtaggatct

SEQ ID NO: 4940 - DNA, 50 bp, Homo sapiens; identical to SEQ ID NO: 1311

SEQ ID NO: 4941 - DNA, 50 bp, Homo sapiens; identical to SEQ ID NO: 1315

SEQ ID NO: 4942 - DNA, 50 bp, Homo sapiens; identical to SEQ ID NO: 1320

SEQ ID NO: 4943 - DNA, 50 bp, Homo sapiens; identical to SEQ ID NO: 1321

SEQ ID NO: 4944 - DNA, 50 bp, Homo sapiens
atgtctataaatggtgtcataactagagcacgggcgttatgtaagtttct

SEQ ID NO: 4945 - DNA, 50 bp, Homo sapiens; identical to SEQ ID NO: 1340

SEQ ID NO: 4946 - DNA, 50 bp, Homo sapiens
acataggcgaagaaaacatggcattgagtgtgctgagtccagacaaatgt

SEQ ID NO: 4947 - DNA, 50 bp, Homo sapiens; identical to SEQ ID NO: 1350

SEQ ID NO: 4948 - DNA, 50 bp, Homo sapiens; identical to SEQ ID NO: 1352

SEQ ID NO: 4949 - DNA, 50 bp, Homo sapiens; identical to SEQ ID NO: 1353

SEQ ID NO: 4950 - DNA, 50 bp, Homo sapiens; identical to SEQ ID NO: 1355

SEQ ID NO: 4951 - DNA, 50 bp, Homo sapiens; identical to SEQ ID NO: 1358

SEQ ID NO: 4952 - DNA, 50 bp, Homo sapiens; identical to SEQ ID NO: 4468

SEQ ID NO: 4953 - DNA, 50 bp, Homo sapiens
aatcacagcagtaactcccagtaggaaagattctcaaaggaatagttctt

SEQ ID NO: 4954 - DNA, 50 bp, Homo sapiens
cctggccttcaagaagtcgtagtggctattttctttggacaaaagtaaga

SEQ ID NO: 4955 - DNA, 50 bp, Homo sapiens
atagacagacggaggtcctgatatccatgggccaacggcttggattattc

SEQ ID NO: 4956 - DNA, 50 bp, Homo sapiens; identical to SEQ ID NO: 1510

SEQ ID NO: 4957 - DNA, 50 bp, Homo sapiens; identical to SEQ ID NO: 1517

SEQ ID NO: 4958 - DNA, 50 bp, Homo sapiens
gatatcagacagcatcgtctctgcgagcacaaagatctgtttgctgagca

SEQ ID NO: 4959 - DNA, 50 bp, Homo sapiens; identical to SEQ ID NO: 1537

SEQ ID NO: 4960 - DNA, 50 bp, Homo sapiens; identical to SEQ ID NO: 1548

SEQ ID NO: 4961 - DNA, 50 bp, Homo sapiens
aattaacggccatcacacccacgactgacggtgatcaaacaaattcacag

SEQ ID NO: 4962 - DNA, 50 bp, Homo sapiens; identical to SEQ ID NO: 1559

SEQ ID NO: 4963 - DNA, 50 bp, Homo sapiens; identical to SEQ ID NO: 3876

SEQ ID NO: 4964 - DNA, 50 bp, Homo sapiens
ctcatagcatagccagcattcagcacacacaaacctactgcccacatttg

SEQ ID NO: 4965 - DNA, 50 bp, Homo sapiens
cacatttgaaggccaaagggaaaacgggggaagcggaagggttggattgg

SEQ ID NO: 4966 - DNA, 50 bp, Homo sapiens
tacgaccactgagaaacgggccacccggcacacggatcttggaacacaaa

SEQ ID NO: 4967 - DNA, 50 bp, Homo sapiens; identical to SEQ ID NO: 3927

SEQ ID NO: 4968 - DNA, 50 bp, Homo sapiens; identical to SEQ ID NO: 3930

SEQ ID NO: 4969 - DNA, 50 bp, Homo sapiens; identical to SEQ ID NO: 3935

SEQ ID NO: 4970 - DNA, 50 bp, Homo sapiens; identical to SEQ ID NO: 3945

SEQ ID NO: 4971 - DNA, 50 bp, Homo sapiens; identical to SEQ ID NO: 3961

SEQ ID NO: 4972 - DNA, 50 bp, Homo sapiens; identical to SEQ ID NO: 3962

SEQ ID NO: 4973 - DNA, 50 bp, Homo sapiens
gcaggttatcgcaagatgtcttagagtagggttacggttctcagtgacac

SEQ ID NO: 4974 - DNA, 50 bp, Homo sapiens
aaatggctttaccaaacattgtcagtacctttacgtgttagaaggcattt

SEQ ID NO: 4975 - DNA, 50 bp, Homo sapiens; identical to SEQ ID NO: 3966

SEQ ID NO: 4976 - DNA, 50 bp, Homo sapiens
ccctacttgattaaagattgaggtggaattctagatgtggtcattcgtgt

SEQ ID NO: 4977 - DNA, 50 bp, Homo sapiens; identical to SEQ ID NO: 3981

SEQ ID NO: 4978 - DNA, 50 bp, Homo sapiens
agaaatggtacggggaatgtgaataacacgaaatggtatggggaaatgtg

SEQ ID NO: 4979 - DNA, 50 bp, Homo sapiens; identical to SEQ ID NO: 4002

SEQ ID NO: 4980 - DNA, 50 bp, Homo sapiens
tgttcttgtgctgctgttatctatactatttttgttcgtgccttctgact

SEQ ID NO: 4981 - DNA, 50 bp, Homo sapiens
gtctgggtgccaacttgagacaggtggtctaggaaattgcggtaagagcg

SEQ ID NO: 4982 - DNA, 50 bp, Homo sapiens; identical to SEQ ID NO: 4009

SEQ ID NO: 4983 - DNA, 50 bp, Homo sapiens; identical to SEQ ID NO: 4010

SEQ ID NO: 4984 - DNA, 50 bp, Homo sapiens
aggctgattcttggagatttaacaccccacaggcaatgggtttatagaca

SEQ ID NO: 4985 - DNA, 50 bp, Homo sapiens
tctcctttcagttcctttgtaggatttctgggcttgaaggatagtcttca

SEQ ID NO: 4986 - DNA, 50 bp, Homo sapiens; identical to SEQ ID NO: 4031

SEQ ID NO: 4987 - DNA, 50 bp, Homo sapiens
agaatgtcccacttgctgtctcttagaggctgagcttcatttctatgagc

SEQ ID NO: 4988 - DNA, 50 bp, Homo sapiens
caacctctggagagtgcctactgttagaagctgaagggatgtcaaagtca

SEQ ID NO: 4989 - DNA, 50 bp, Homo sapiens; identical to SEQ ID NO: 4041

SEQ ID NO: 4990 - DNA, 50 bp, Homo sapiens
gcctcagtacagagggggctctggaagtgtttgttgactgaataaacgga

SEQ ID NO: 4991 - DNA, 50 bp, Homo sapiens; identical to SEQ ID NO: 4054

SEQ ID NO: 4992 - DNA, 50 bp, Homo sapiens
tgcctaagagcaaagcatcctctgcgacaaaagaaaattactgtagtggc

SEQ ID NO: 4993 - DNA, 50 bp, Homo sapiens; identical to SEQ ID NO: 4057

SEQ ID NO: 4994 - DNA, 50 bp, Homo sapiens
gacatggagcccccggaaaagcgggtctggacaccaagtcgatgtgtgag

SEQ ID NO: 4995 - DNA, 50 bp, Homo sapiens
acagaatcagattttgcaggtgtccaacctatagtggctaagaattatgt

SEQ ID NO: 4996 - DNA, 50 bp, Homo sapiens; identical to SEQ ID NO: 4067

SEQ ID NO: 4997 - DNA, 50 bp, Homo sapiens; identical to SEQ ID NO: 4070

SEQ ID NO: 4998 - DNA, 50 bp, Homo sapiens; identical to SEQ ID NO: 4075

SEQ ID NO: 4999 - DNA, 50 bp, Homo sapiens; identical to SEQ ID NO: 4077

SEQ ID NO: 5000 - DNA, 50 bp, Homo sapiens
tggagatccttctacttggctgctgtattcatgcattatgttggtttgag

SEQ ID NO: 5001 - DNA, 50 bp, Homo sapiens
atttgtaccaaatctttgggattcattggcaaataatttcagtgtggtgt

SEQ ID NO: 5002 - DNA, 50 bp, Homo sapiens
ggttttagcagttctttagcccgtggtatttcagtgttgggtttcatagc

SEQ ID NO: 5003 - DNA, 50 bp, Homo sapiens
gggagccataagaacgactccaaaaagagccccaaaggaggacaaggggg

SEQ ID NO: 5004 - DNA, 50 bp, Homo sapiens
tcagggtcttggatactcaagagaaaggagacttgtggttaatgtttgga

SEQ ID NO: 5005 - DNA, 50 bp, Homo sapiens
tccttagcacacgaaaaagccccttcccctggattcatgtttcttatttc

SEQ ID NO: 5006 - DNA, 50 bp, Homo sapiens
aagcaagtagacaccttcataactatgaatgaagctgctgaagtagtgtt

SEQ ID NO: 5007 - DNA, 50 bp, Homo sapiens
tccattaaagatcgcaaatgttgaggtcctgtagcctgaaaactctctgc

SEQ ID NO: 5008 - DNA, 50 bp, Homo sapiens
ctgattcaaacaggttccaacgtaaaacgttcacacttccaccatttcct

SEQ ID NO: 5009 - DNA, 50 bp, Homo sapiens
tgatgttggtatgcttgccctgttacttatagacagtctttgtcataggc

SEQ ID NO: 5010 - DNA, 50 bp, Homo sapiens
ggtctttgtcccagtagagttcatagtctatttagtgtgcatgtttttcc

SEQ ID NO: 5011 - DNA, 50 bp, Homo sapiens
ttgtgtccaaaagtgttaacgaagactacttaacccaatgattggcgcga

SEQ ID NO: 5012 - DNA, 50 bp, Homo sapiens
atgcgtggatattgagaacttaggtgtctaatggggaggattattgctgt

SEQ ID NO: 5013 - DNA, 50 bp, Homo sapiens
aagcatttccatttcaacgagtttgtcagctttattaatgttgggcaaaa

SEQ ID NO: 5014 - DNA, 50 bp, Homo sapiens
aaacctaccactttaagaagacagcgatgggtaattctttattggcaggt

SEQ ID NO: 5015 - DNA, 50 bp, Homo sapiens
attcagcattagtttctcacatcttcccccaggtatccccaacagaatta

SEQ ID NO: 5016 - DNA, 50 bp, Homo sapiens
acacctctcttagggctccatcaaacagaacttttagactgagtaacgct

SEQ ID NO: 5017 - DNA, 50 bp, Homo sapiens; identical to SEQ ID NO: 4297

SEQ ID NO: 5018 - DNA, 50 bp, Homo sapiens
accatgaacagtgtgttgcttcagactattacaaagagaatggggcaggt

SEQ ID NO: 5019 - DNA, 50 bp, Homo sapiens
tttttgaaaagtatgtttggtagaaattagttgtatgccctcaggacggt

SEQ ID NO: 5020 - DNA, 50 bp, Homo sapiens
gaaattagtgtgaacatgtgggaagcccgatgcatgtgggtcagggatct

SEQ ID NO: 5021 - DNA, 50 bp, Homo sapiens
tccctgggtgataccattcaatgtcttaatgtacttgtggctcagacctg

SEQ ID NO: 5022 - DNA, 50 bp, Homo sapiens
cagacagcacagcctgagggtagcagcagccacccatgttcaggtaagtc

SEQ ID NO: 5023 - DNA, 50 bp, Homo sapiens
gccatgaggtggaggacgtggacctggagctgttcaacatctcggtgcag

SEQ ID NO: 5024 - DNA, 50 bp, Homo sapiens
tctgcacccaaacaaataccttttgagatttcttataggcattcctctcg

SEQ ID NO: 5025 - DNA, 50 bp, Homo sapiens
gaagctctgccgcagcgccaggcacttcctacaccactactacgtccacg

SEQ ID NO: 5026 - DNA, 50 bp, Homo sapiens
cagctcggaccaccgccacctccctttttatttacagatcacccagtaag

SEQ ID NO: 5027 - DNA, 50 bp, Homo sapiens
ggtcccctcctggagactccctcacaaaatctttccccaagctgttcccc

SEQ ID NO: 5028 - DNA, 50 bp, Homo sapiens
tgaatgggcgtttatcttaatgaccagttattgaccaaagtgtactcaga

SEQ ID NO: 5029 - DNA, 50 bp, Homo sapiens
agcctattcctattctctagcctattccttaccacctgtaatcttgacca

SEQ ID NO: 5030 - DNA, 50 bp, Homo sapiens
gcaatgggcggccaactatgaaccctacgtggtggtgccacgagactgtc

SEQ ID NO: 5031 - DNA, 50 bp, Homo sapiens
gcctggagcttggctttgtatccaagtgtatggttgctttgtctaagagg

SEQ ID NO: 5032 - DNA, 50 bp, Homo sapiens; identical to SEQ ID NO: 1495

SEQ ID NO: 5033 - DNA, 50 bp, Homo sapiens
agcctacaagccacctcgccactgtgaacttgtcgtcactcttggatgtc

SEQ ID NO: 5034 - DNA, 50 bp, Homo sapiens
cctgctcacagaccaggaactctacaagctggaccctgaccggcagtacc

SEQ ID NO: 5035 - DNA, 50 bp, Homo sapiens
agcagttccacagtgtttcacactacaggatttaaatattttgctccaga

SEQ ID NO: 5036 - DNA, 50 bp, Homo sapiens
cctttatccacctggattttagggacaaacactgaaaacgaataagtcca

SEQ ID NO: 5037 - DNA, 50 bp, Homo sapiens; identical to SEQ ID NO: 5036

SEQ ID NO: 5038 - DNA, 50 bp, Homo sapiens
cagagaacgaaagtcaagtgcagcgagttgggtggaagctgatagagcaa

SEQ ID NO: 5039 - DNA, 50 bp, Homo sapiens
ccacaaaccattcagatcaggcacttgctgaccctggttcttaaggacac

SEQ ID NO: 5040 - DNA, 50 bp, Homo sapiens
aagaaactatgtagcatagtgtcttaacacctcagtaaagtaagctggcc

SEQ ID NO: 5041 - DNA, 50 bp, Homo sapiens
agcaggagacagcttcctgatctagatgtacaattagagtttaggttgga

SEQ ID NO: 5042 - DNA, 50 bp, Homo sapiens
tggaactagtcacaattgaagttcttcatccagtaggtgttaaacagtgt

SEQ ID NO: 5043 - DNA, 50 bp, Homo sapiens
cccacacaagtgcgccacataaatctgcgagactccacgacaacacaggg

SEQ ID NO: 5044 - DNA, 50 bp, Homo sapiens
gcaaacaagttctaaagttgtggagaaaaagtgatgtggtcaagagttga

SEQ ID NO: 5045 - DNA, 50 bp, Homo sapiens
gcaagaaagagaaacgtaaaaacagatagagattctgcctgtgctttggt

SEQ ID NO: 5046 - DNA, 50 bp, Homo sapiens
gagagttgctggtgtaaaatacgtttgaaatagttgatctacaaaggcca

SEQ ID NO: 5047 - DNA, 50 bp, Homo sapiens
ggttaacgcttctgtgaggaccttctggctcttgagataccctaaatatt

SEQ ID NO: 5048 - DNA, 50 bp, Homo sapiens
actttcattggtaaataagcctgtcttcctatctggatttttggtgtgca

SEQ ID NO: 5049 - DNA, 50 bp, Homo sapiens
cagttatttaaaggctgacaactgccttccagacccgcgctgtattaata

SEQ ID NO: 5050 - DNA, 50 bp, Homo sapiens
tggtgggtacagaaacattgtcacagggatcctggaacagaggaagagtt

SEQ ID NO: 5051 - DNA, 50 bp, Homo sapiens
ttctgacctaataattacgggaaatggaaagtctgggccagcatcaataa

SEQ ID NO: 5052 - DNA, 50 bp, Homo sapiens
tgggtcggcaaagctattataactttgaatgctaacggcatgtttgacct

SEQ ID NO: 5053 - DNA, 50 bp, Homo sapiens
gctgtgtcctttctggcacaatcggggattccattctttagacactggaa

SEQ ID NO: 5054 - DNA, 50 bp, Homo sapiens
ttgacaaagatgacatcgccccaagagccaaaaataaatgggaattgaaa

SEQ ID NO: 5055 - DNA, 50 bp, Homo sapiens
gtaaagatcagaataccaaggccagctaaggcaacgactccctccccaaa

SEQ ID NO: 5056 - DNA, 50 bp, Homo sapiens; identical to SEQ ID NO: 1668

SEQ ID NO: 5057 - DNA, 50 bp, Homo sapiens
atgctggtgtcatgtgacatttgttgagtctcgggcatgttcacggtggg

SEQ ID NO: 5058 - DNA, 50 bp, Homo sapiens
ggaaattgtgccaaaaccatggaaaatattactgtgtgtggggtgtctgt

SEQ ID NO: 5059 - DNA, 50 bp, Homo sapiens
tttgtgtgtgaaatataacattgattgaattgcagttacatttggttagt

SEQ ID NO: 5060 - DNA, 50 bp, Homo sapiens; identical to SEQ ID NO: 1868

SEQ ID NO: 5061 - DNA, 50 bp, Homo sapiens
taaggttaggcaataacttaggggtatattctcttcctgcatcccagtgc

SEQ ID NO: 5062 - DNA, 50 bp, Homo sapiens
taaggtgtttgctgggggatgttgtgtgtattaggggagtgtttcccttg

SEQ ID NO: 5063 - DNA, 50 bp, Homo sapiens; identical to SEQ ID NO: 3550

SEQ ID NO: 5064 - DNA, 50 bp, Homo sapiens; identical to SEQ ID NO: 3567

SEQ ID NO: 5065 - DNA, 50 bp, Homo sapiens
actggtgttggtgcttttgtctgtcataccatagtattttcaaaacttca

SEQ ID NO: 5066 - DNA, 50 bp, Homo sapiens
ccttgagaaacacccatctccacttcctagacaaaccaatgaacattagt

SEQ ID NO: 5067 - DNA, 50 bp, Homo sapiens; identical to SEQ ID NO: 3688

SEQ ID NO: 5068 - DNA, 50 bp, Homo sapiens
ctaagtcattgcaggaacggggctgtgttctctgctgggacaaaacagga

SEQ ID NO: 5069 - DNA, 50 bp, Homo sapiens
gccgttctttatagaacaattcctttctcttctcttgaatgtggcagtca

SEQ ID NO: 5070 - DNA, 50 bp, Homo sapiens
agcctacctccctaccccaagctgtctgttgagagcagtgctgaccccag

SEQ ID NO: 5071 - DNA, 50 bp, Homo sapiens
tttcataaacccactccttcctcttcacccacttgcaatccgcatgcttc

SEQ ID NO: 5072 - DNA, 50 bp, Homo sapiens
caagttggtttagttatgtaacaacctgacatgatggaggaaaacaacct

SEQ ID NO: 5073 - DNA, 50 bp, Homo sapiens
gactcgttacgccgtagtttgtcctatcttgtttatcaaatgaatttcgt

SEQ ID NO: 5074 - DNA, 50 bp, Homo sapiens
agccgcccagctacttaatccctcagtaacatctatctaaatctcccatg

SEQ ID NO: 5075 - DNA, 50 bp, Homo sapiens
tggcctgtgcttttaccacaccgtcaaacccttgatcatttctgtaaaca

SEQ ID NO: 5076 - DNA, 50 bp, Homo sapiens
acattctcatagtccaggggctcaacaactttggccttttccagcaccac

SEQ ID NO: 5077 - DNA, 50 bp, Homo sapiens
tcagcagttgtgccttttctcacagatccagccgtccttctcgctgtcac

SEQ ID NO: 5078 - DNA, 50 bp, Homo sapiens
tgcaagcaataaaatcttgctttaatcagtaaccactgtctgacaggaca

SEQ ID NO: 5079 - DNA, 50 bp, Homo sapiens
ggtcgtagagaagacagcaagggaggggataaaacccaggaaggacttaa

SEQ ID NO: 5080 - DNA, 50 bp, Homo sapiens
ggctcacgatgacaaccgcctacggaaaaactctaattcctaaacatcta

SEQ ID NO: 5081 - DNA, 50 bp, Homo sapiens
gacaagccaggtcagcccagattgccaaagcagcacttgcctacaccagc

SEQ ID NO: 5082 - DNA, 50 bp, Homo sapiens
ggttcccttgaagcagtgccaacctaaatctacctcaggtaagtagttag

SEQ ID NO: 5083 - DNA, 50 bp, Homo sapiens
gctgacagtatggaggctaaaggtgtggaggaaccaggaggagatgagta

SEQ ID NO: 5084 - DNA, 50 bp, Homo sapiens
caagtgtgccgggcaagtttgggaaggtgaagcaatctgtgacttaaata

SEQ ID NO: 5085 - DNA, 51 bp, Homo sapiens
gagctactcaaggggaaaaaagggcatatagtatgctctggtagtaaaagt

SEQ ID NO: 5086 - DNA, 50 bp, Homo sapiens; identical to SEQ ID NO: 4220

SEQ ID NO: 5087 - DNA, 50 bp, Homo sapiens
tggtgataatagagattgtttctgccctgggggtagttcaaggataacac

SEQ ID NO: 5088 - DNA, 50 bp, Homo sapiens
cttcaggtttggcccagcccctccttgaagactccttccatccagtcaag

SEQ ID NO: 5089 - DNA, 50 bp, Homo sapiens
cccaagtgaagtcaaagttactgtgtggttgatagggaacatggctggat

SEQ ID NO: 5090 - DNA, 50 bp, Homo sapiens
acccgcagaccagatggttgaaaggaaaaattaaagccttcttggggatt

SEQ ID NO: 5091 - DNA, 50 bp, Homo sapiens
ggagttagatcaaccttatggggaagggaaaggcagggcttgtgacaatt

SEQ ID NO: 5092 - DNA, 50 bp, Homo sapiens
gatggctgcttggttgctaaacccagacagggtccttccagtgcatctgc

SEQ ID NO: 5093 - DNA, 50 bp, Homo sapiens
catttgtgggtggagggttttgaatgtcctctttccatgtcaggcaaagg

SEQ ID NO: 5094 - DNA, 50 bp, Homo sapiens
ttctatgaaggtttccctggacaagaaactgccagagagcccttagctca

SEQ ID NO: 5095 - DNA, 50 bp, Homo sapiens
tgctgaatgtacctgagtgtatgtatttaaaaggactcacatgggcatca

SEQ ID NO: 5096 - DNA, 50 bp, Homo sapiens
tctcaaccctaatattcattgttccatgagcattgtcaggttttggatgg

SEQ ID NO: 5097 - DNA, 50 bp, Homo sapiens
acaagtggaagaggaagacagaagaatgggtcagggagatgcaaggatgg

SEQ ID NO: 5098 - DNA, 50 bp, Homo sapiens
tccttagggaaaagaagattttcaaacccttcgttagtttcggtagggcc

SEQ ID NO: 5099 - DNA, 50 bp, Homo sapiens
acgcaatttgttcacatacatacacatgcaaatcccaaaagaaggtttta

SEQ ID NO: 5100 - DNA, 50 bp, Homo sapiens
cccagccctctatgtacccgtgtcccagccagcaataaatgccatcttgg

SEQ ID NO: 5101 - DNA, 50 bp, Homo sapiens
agcctggaattctaagcagcagtttcacaatctgtaattgcacgtttctg

SEQ ID NO: 5102 - DNA, 50 bp, Homo sapiens
tggttactcatgtcctcaaagacgactcatgatgctggatatgaagaact

SEQ ID NO: 5103 - DNA, 50 bp, Homo sapiens
aggcaaaagtcatttcttccctatattttgtcatgcttatctcctgtctc

SEQ ID NO: 5104 - DNA, 50 bp, Homo sapiens
gtatgaaggcaagaaaatttcaggggaaaacaagtggttattttctggcc

SEQ ID NO: 5105 - DNA, 50 bp, Homo sapiens
gataccctcttcctaagactcatcgcgtctcttccagcctcctcgcccca

SEQ ID NO: 5106 - DNA, 50 bp, Homo sapiens
tctgtatgctgtggtctcatcaggaacctttctctgcactgcatttttcc

SEQ ID NO: 5107 - DNA, 50 bp, Homo sapiens
agagctggttccagaaggttcggatgagtcctgaatgtttatgtagggca

SEQ ID NO: 5108 - DNA, 50 bp, Homo sapiens
tccttagtctccttcaatttccacacactgaacatgacattttacccttt

SEQ ID NO: 5109 - DNA, 50 bp, Homo sapiens
ttttctgttttctgttttaagaaaatctggaaccgcaaggccgtcccttt

SEQ ID NO: 5110 - DNA, 50 bp, Homo sapiens
ccaaagcctttgttgtttggtggcgaggcccctttttgaatggggttttt

SEQ ID NO: 5111 - DNA, 50 bp, Homo sapiens
tgccgcccccaggattcttttaagaataaaaagaaatgagtgtggacatg

SEQ ID NO: 5112 - DNA, 50 bp, Homo sapiens
cctacgatatccttttcaaataggggtgggtccagcccccttgtgccctg

SEQ ID NO: 5113 - DNA, 50 bp, Homo sapiens
ctgggagaaaggtactttgggttagtggtagggatagggatgaacgggaa

SEQ ID NO: 5114 - DNA, 50 bp, Homo sapiens
agcataatcctaatgaggaactttgtctgaagtctgaggctgagttactt

SEQ ID NO: 5115 - DNA, 50 bp, Homo sapiens
ttttggaacccttagccctgtgcaaatcaaaggatgtgaggggaaaaagg

SEQ ID NO: 5116 - DNA, 50 bp, Homo sapiens
atttcccctacggatgggaccaagaaactgatgagaacggccaagtgttt

SEQ ID NO: 5117 - DNA, 50 bp, Homo sapiens
aacacccgaaaccgtcttctgtggcatttgtcagttgaaaaagaacacct

SEQ ID NO: 5118 - DNA, 50 bp, Homo sapiens
ccagtggctgggatggtgacagtgacatccacagtaaacagatgaaatgt

SEQ ID NO: 5119 - DNA, 50 bp, Homo sapiens
ggatttcagaaacagttgcagatattattgattagctagttggcagtggg

SEQ ID NO: 5120 - DNA, 50 bp, Homo sapiens
cttgttcccaggccagccccacacagtaggcagtcattaaagtttggtga

SEQ ID NO: 5121 - DNA, 50 bp, Homo sapiens
ttttccttcaactcttgcgactttcttggtctgcctgtgtggttttaata

SEQ ID NO: 5122 - DNA, 50 bp, Homo sapiens
ttctgttaatagcaaacattgcctttgagtgctactactaaacctgaggc

SEQ ID NO: 5123 - DNA, 50 bp, Homo sapiens
tctagggatctgcccggctcaaaatcccaggccgttaggctaagttgttc

SEQ ID NO: 5124 - DNA, 50 bp, Homo sapiens
cggacaagggctggcaggtaaatgccttcagtttgttgttaaatagaggc

SEQ ID NO: 5125 - DNA, 50 bp, Homo sapiens
agccttagcccctttaaagcacttaaagttactacttccaaatgtgattt

SEQ ID NO: 5126 - DNA, 50 bp, Homo sapiens
accttgtcattaacagctcactttgattgaacatctactctgtggcggtt

SEQ ID NO: 5127 - DNA, 50 bp, Homo sapiens
tggaacggctatttgccggtttaaaaaccaaaaaccccggtttttccaaa

SEQ ID NO: 5128 - DNA, 50 bp, Homo sapiens
gtaaggcagacgagagaggcggaggtctcacagtgaaccacaggatctgg

SEQ ID NO: 5129 - DNA, 50 bp, Homo sapiens
ttgcctgccatgcccttataagtgccctttaatgtcatagcatgtaaagg

SEQ ID NO: 5130 - DNA, 50 bp, Homo sapiens
gggtttgtgtccccatttagaatctgatgaaacggtgggctttccttctt

SEQ ID NO: 5131 - DNA, 50 bp, Homo sapiens
cagagcctccagaattatgtgaacttgtctcaaaacattctctaaatggc

SEQ ID NO: 5132 - DNA, 50 bp, Homo sapiens
gaaaggacccgagggtttgtatttaaaaagcctcccctgggcctcaaaaa

SEQ ID NO: 5133 - DNA, 50 bp, Homo sapiens; identical to SEQ ID NO: 4265

SEQ ID NO: 5134 - DNA, 50 bp, Homo sapiens
tgtctagaacagactgagagtgacacgcatatttgattgtgaggacagtt

SEQ ID NO: 5135 - DNA, 50 bp, Homo sapiens
gtttggcccccaaagtgtttaggagagctttctccctagatcgccctgtg

SEQ ID NO: 5136 - DNA, 50 bp, Homo sapiens
ccaggagggccagaatttgaaaattccttggggttgttctttttccaaaa

SEQ ID NO: 5137 - DNA, 50 bp, Homo sapiens
cagtttgagcaaaagcctttgaaatccaagacttttccccttggggtgct

SEQ ID NO: 5138 - DNA, 50 bp, Homo sapiens
ccagttggtttttggactccaaagcccaggacccttccaaatcctgcttg

SEQ ID NO: 5139 - DNA, 50 bp, Homo sapiens
aggcctttttcaaagaaaaacccctttggggaaaaagggaaagggcaaaa

SEQ ID NO: 5140 - DNA, 50 bp, Homo sapiens
ttttgcttgctgtcgggagaataaagcagggaacctttatgtagtgaaaa

SEQ ID NO: 5141 - DNA, 50 bp, Homo sapiens
gggtttggcccgattatattaggttgggtgggggaaaaattttatggggg

SEQ ID NO: 5142 - DNA, 50 bp, Homo sapiens
gtgaactggatcttgaggccgtgctggaaaccggaaggtacactgcttgg

SEQ ID NO: 5143 - DNA, 50 bp, Homo sapiens
caaaacttgagataaggttaaaactgtgcccagaggaaaactggtagtct

SEQ ID NO: 5144 - DNA, 50 bp, Homo sapiens
tgcagccagattgttccaaggttgccaattacctagtgggtaaatttccc

SEQ ID NO: 5145 - DNA, 50 bp, Homo sapiens
agtgcttatcatgaaatgtgcttcactggttcagctctgttgtttcctta

SEQ ID NO: 5146 - DNA, 50 bp, Homo sapiens
gttatttgggagacaaatggacgggcaggaagattgatgctccgctgttc

SEQ ID NO: 5147 - DNA, 50 bp, Homo sapiens
agctgaagggcttcaactttgcttggatttttaaatattttccttgcata

SEQ ID NO: 5148 - DNA, 50 bp, Homo sapiens
tgcaggctcattgtgctccttcttctgggtttcaattggatttcagtcct

SEQ ID NO: 5149 - DNA, 50 bp, Homo sapiens
atctctaatgaagcctaggatcagatttgtggcataccaacagcacatgt

SEQ ID NO: 5150 - DNA, 50 bp, Homo sapiens
ccacaagggttagtttgggccttaaaactgccaaggagtttccaaggatt

SEQ ID NO: 5151 - DNA, 50 bp, Homo sapiens
cgctttattcccacgaaacctaggacagtggccatcaaaccgagcgcttt

SEQ ID NO: 5152 - DNA, 50 bp, Homo sapiens
cctgttgtggctggctgcataataatttccaggaggctttcggaaatgtt

SEQ ID NO: 5153 - DNA, 50 bp, Homo sapiens
cggtccagtcggctgcttccattccctgaagaagaggccctaaagttaaa

SEQ ID NO: 5154 - DNA, 50 bp, Homo sapiens
ttagcctcaaaggggtggggaaaagcccatacctcctgggccagtcctag

SEQ ID NO: 5155 - DNA, 50 bp, Homo sapiens
ccttagaattaagttgaattttcctgccttgctaagcaagacttcctgca

SEQ ID NO: 5156 - DNA, 50 bp, Homo sapiens
cagccacggcccctcgcgtcttcgcggcacgttaattaaatgcggaaaac

SEQ ID NO: 5157 - DNA, 50 bp, Homo sapiens
ttttacccaaattttaaaggccggataaaagggtttttgtttggaaggga

SEQ ID NO: 5158 - DNA, 50 bp, Homo sapiens
ggaggttagggcctgaagctcaaagctccccctttttaatagtttttccc

SEQ ID NO: 5159 - DNA, 50 bp, Homo sapiens
cccctttgggccccccgggttttccctttttggtttcgggttgttttttg

SEQ ID NO: 5160 - DNA, 50 bp, Homo sapiens
acgtgggcctttggaccccttataagatggtcataagaccccaaaactga

SEQ ID NO: 5161 - DNA, 50 bp, Homo sapiens
atggctataaggccaaaaaagtttggcggcatgggggattttttgctctt

SEQ ID NO: 5162 - DNA, 50 bp, Homo sapiens
agagacggccacctgagaccaattagaatatccacaccagtggaagagag

SEQ ID NO: 5163 - DNA, 50 bp, Homo sapiens
gcctccccaacccctggcctcaatttccctttctataaaatggaagatgt

SEQ ID NO: 5164 - DNA, 50 bp, Homo sapiens
acacccagccaaagaaaagcatacctgaatccaagagagtatttacactg

SEQ ID NO: 5165 - DNA, 50 bp, Homo sapiens
ctcagagaagaacagtgtagaaacccgcgctgtgtgaagcgaggttgggc

SEQ ID NO: 5166 - DNA, 50 bp, Homo sapiens
actttccattgttgagctggggagttggattttgtccatttgtttttatg

SEQ ID NO: 5167 - DNA, 50 bp, Homo sapiens
tcccagtgatgattcgctccctttgttaattactcagtgtttcttgtttt

SEQ ID NO: 5168 - DNA, 50 bp, Homo sapiens
tgcgtgctgctaatacttaggtacccataataggtctttacactcagttt

SEQ ID NO: 5169 - DNA, 50 bp, Homo sapiens
cctgaccttgaggcatttttgattgtgcagttacctagggtatgcttgtg

SEQ ID NO: 5170 - DNA, 50 bp, Homo sapiens
gaggactgggaccgtgattccactaaccggaaaccgtcgcctttcgggcc

SEQ ID NO: 5171 - DNA, 50 bp, Homo sapiens
ggggaagtcaaggagacacacacgctctttcaacagaatcagctcttaat

SEQ ID NO: 5172 - DNA, 50 bp, Homo sapiens
aactagatcctgccttagaaaaccttttgccatgaatgacaaattcatgt

SEQ ID NO: 5173 - DNA, 50 bp, Homo sapiens
tgtcagcatctggaatagtgtaagtatgcagtggaggaaatctcatcctt

SEQ ID NO: 5174 - DNA, 50 bp, Homo sapiens
ttaacaggacctctgggccaccaaggagaaagggctggggaagccaagag

SEQ ID NO: 5175 - DNA, 50 bp, Homo sapiens
gttctgtgatagtttgtttcccctcatctccctcacctctgcctgggttg

SEQ ID NO: 5176 - DNA, 50 bp, Homo sapiens
ggcccctccttttgctggagagttttttataaactggagcccgatttcat

SEQ ID NO: 5177 - DNA, 50 bp, Homo sapiens
gggctttttcttcccctaatcagggtgacctgggccttttgggcaggatc

SEQ ID NO: 5178 - DNA, 50 bp, Homo sapiens
aaggaggggagtgaatgatattgctgtcatttctcagcaaatcatagtga

SEQ ID NO: 5179 - DNA, 50 bp, Homo sapiens
taaaattctctgtgggaaaaagcctgccaataaaatgggggtttttgggc

SEQ ID NO: 5180 - DNA, 50 bp, Homo sapiens
acagactaagctggtttggtggattcatctttcacttatgaagaaagcag

SEQ ID NO: 5181 - DNA, 50 bp, Homo sapiens
cccaaagcctggggggtttggcccaaaccttccccctggtttttataaaa

SEQ ID NO: 5182 - DNA, 50 bp, Homo sapiens
actgctttcaagaaagtgggaccagtggcattgtagccaccataatcact

SEQ ID NO: 5183 - DNA, 50 bp, Homo sapiens
gcccttggcaaatgatttgagaccccttttgaaaaccatgtaggatgaat

SEQ ID NO: 5184 - DNA, 50 bp, Homo sapiens
cacacagcagtggcttggggatgaggaaggaagggagaatctcaacggag

SEQ ID NO: 5185 - DNA, 50 bp, Homo sapiens
tttttctgtgagttaggggcatggaggcggcagtgttgggagctggagcc

SEQ ID NO: 5186 - DNA, 51 bp, Homo sapiens
agttggctctagtttaaagatataaatacgtacctcacttaaaccccatgt

SEQ ID NO: 5187 - DNA, 50 bp, Homo sapiens
cttcaggcccaagttcaacgggttaaagaggtccgctcccaaattattct

SEQ ID NO: 5188 - DNA, 50 bp, Homo sapiens
gtcccagtagccccatttcagggcttgctagttacatgggtttgtgttta

SEQ ID NO: 5189 - DNA, 50 bp, Homo sapiens
ggatgtgtgatgtttatatgggagaacaaaaagctgatgtatagccctgt

SEQ ID NO: 5190 - DNA, 50 bp, Homo sapiens
caatttccacctctaagggggtcgggaaaggcacgctgagggtgaatatg

SEQ ID NO: 5191 - DNA, 50 bp, Homo sapiens
gctttcaaatgaatttcagggctttctttgaagcagtcttgtaaagttgt

SEQ ID NO: 5192 - DNA, 50 bp, Homo sapiens
tcctttctggataccaggaatcacttaaaaatctgtgtataatgccccca

SEQ ID NO: 5193 - DNA, 50 bp, Homo sapiens
aaacagggaacgacaggaaaaagatgaccgtgatacactctgctaaaagc

SEQ ID NO: 5194 - DNA, 50 bp, Homo sapiens
cccccccggcttcccccttttttccccgcccgtttttttgggggaatggg

SEQ ID NO: 5195 - DNA, 50 bp, Homo sapiens
ggccatgccgggccagccccacctgaagctcagtgaaagctgattaaaaa

SEQ ID NO: 5196 - DNA, 50 bp, Homo sapiens
cgcaggactctaaagatccaagctcacaaaacactccaaatccacctcga

SEQ ID NO: 5197 - DNA, 50 bp, Homo sapiens
aactttacttctgttcttggcaggacatggagagagggagggattccaaa

SEQ ID NO: 5198 - DNA, 50 bp, Homo sapiens
gggtgataattgagggtgccgctgggaaggtccgagaatgggttttcatg

SEQ ID NO: 5199 - DNA, 50 bp, Homo sapiens
gttcattgctgttcagagtgttgctgctgtggtgctataaatgctcccag

SEQ ID NO: 5200 - DNA, 50 bp, Homo sapiens
tattccaccagtgagctacactcccggcccctttagtgttgtttgtaaac

SEQ ID NO: 5201 - DNA, 50 bp, Homo sapiens
ccgtgttgtggcaaaatggtccctggagtttttgaccctgtgtttaaaga

SEQ ID NO: 5202 - DNA, 50 bp, Homo sapiens
ttttttggggccgaaaacccccaatgagggggattaaagctgttttcccc

SEQ ID NO: 5203 - DNA, 50 bp, Homo sapiens
ggggttgtccttttcccaccctgatggggaatttatggatgggtttcctt

SEQ ID NO: 5204 - DNA, 50 bp, Homo sapiens
aaatgagtgaccaaaacacttctgtaccacttctgtgagctgaggtccag

SEQ ID NO: 5205 - DNA, 50 bp, Homo sapiens
aggaacctaaagaaactgccaagtgtagataagcattgagtatgttaccc

SEQ ID NO: 5206 - DNA, 50 bp, Homo sapiens
ggttgtccagttttcggtttttaacgccccccataggggatttggccccc

SEQ ID NO: 5207 - DNA, 50 bp, Homo sapiens
gttttggaatgaggaatgatttttctaagcctgacatcagatgtctgaca

SEQ ID NO: 5208 - DNA, 50 bp, Homo sapiens
gaaattctccccttttcccctctccttcccttctgctgacctgttctcag

SEQ ID NO: 5209 - DNA, 50 bp, Homo sapiens
cacagagggagtgtgcagggccagatttcatcctggggccacgctgaaat

SEQ ID NO: 5210 - DNA, 50 bp, Homo sapiens
tgataggacatagtagtacgggtggtcagacatgaaaatggtggggagcc

SEQ ID NO: 5211 - DNA, 50 bp, Homo sapiens
caatacctacccccagtggcagccgcctgctcctcatgacccaagtaagt

SEQ ID NO: 5212 - DNA, 50 bp, Homo sapiens
tgttttaacaactcttctcaacattttgtccaggttattccctgtaacca

SEQ ID NO: 5213 - DNA, 50 bp, Homo sapiens
taagtgtcaggtttgtggggaaggttattcttgccttgtgtattttgtcc

SEQ ID NO: 5214 - DNA, 50 bp, Homo sapiens
caaacccctatcccccattctcctcctatccctcaaccccgacatcatta

SEQ ID NO: 5215 - DNA, 50 bp, Homo sapiens
cctgcaacagctaaggccaagccaaacttaccgtggactcaaacactttg

SEQ ID NO: 5216 - DNA, 50 bp, Homo sapiens; identical to SEQ ID NO: 372

SEQ ID NO: 5217 - DNA, 50 bp, Homo sapiens
tcccaccccttttctactgaatttgtggggatcctataataaaagtgaat

SEQ ID NO: 5218 - DNA, 50 bp, Homo sapiens
actaccagagccctaggacttctgagcacatttagaaaataccagaggca

SEQ ID NO: 5219 - DNA, 50 bp, Homo sapiens
catgtcagagttcttaacagaaagcaaaggtttccaacagcacttgcatt

SEQ ID NO: 5220 - DNA, 50 bp, Homo sapiens
atgaaatctcatggggccaaactgcacatcagctactgctaccttcttgc

SEQ ID NO: 5221 - DNA, 50 bp, Homo sapiens
ccctgtggcaacttgtgggtacggtttaactggaccacgctgagcttctg

SEQ ID NO: 5222 - DNA, 50 bp, Homo sapiens
agaaatagtgtttctcggaagctcagtttggagctgactgcacacgttgc

SEQ ID NO: 5223 - DNA, 50 bp, Homo sapiens
gttgctggctgccctcccctgcactctccctgaaataaagaacagcttgg

SEQ ID NO: 5224 - DNA, 50 bp, Homo sapiens; identical to SEQ ID NO: 5223

SEQ ID NO: 5225 - DNA, 50 bp, Homo sapiens
acgtgtcagacacaatcctgagccttctacaagtgttccctcttactcct

SEQ ID NO: 5226 - DNA, 50 bp, Homo sapiens
aagccctgtttacccaggtttttcttaaggcgagaaggtttagggtggtg

SEQ ID NO: 5227 - DNA, 50 bp, Homo sapiens
gagaaagctcccagtctgtctttcccaacatcccttcagtttcaataagc

SEQ ID NO: 5228 - DNA, 50 bp, Homo sapiens
ttcaggtgagtgtgcctggaggtggagaactatggttttgataacttggc

SEQ ID NO: 5229 - DNA, 50 bp, Homo sapiens
aaggtgccatgtattgaaagtgtgcgtcaaagaacataaatatcagtgga

SEQ ID NO: 5230 - DNA, 52 bp, Homo sapiens
tgtaattattttctgtatgttcaagaaggtaaaggaaaggacagctatggga

SEQ ID NO: 5231 - DNA, 51 bp, Homo sapiens
atttatttggggttggtcccccctttgggccccccgggttttccctttttt

SEQ ID NO: 5232 - DNA, 50 bp, Homo sapiens
aaccataaaaggcccgtttggttagttttccctgtttcctggtttgggct

SEQ ID NO: 5233 - DNA, 50 bp, Homo sapiens
ttatggggtaactcactttgggcggcacgaagaactccaggcggaagcgt

SEQ ID NO: 5234 - DNA, 50 bp, Homo sapiens
tctctccccatcccaagtcatccagccctttttcctaccctcaataaacc

SEQ ID NO: 5235 - DNA, 50 bp, Homo sapiens
ccccctgatggacttcaaatatgtctcatcaactacagtattaaatgcca

SEQ ID NO: 5236 - DNA, 50 bp, Homo sapiens
cgagaatgcctagggaaaccagctacgcttacaagccagctacgcagccc

SEQ ID NO: 5237 - DNA, 50 bp, Homo sapiens
ggaaacattggcctgggggtgtcccccaaaagggggccgtttttaaaggg

SEQ ID NO: 5238 - DNA, 50 bp, Homo sapiens
tgggttgacattgttcgcacggggtgtttcttatattaaaaagactcact

SEQ ID NO: 5239 - DNA, 50 bp, Homo sapiens
ctttccacaaaataatcgataaccttgggggattgttttatggcttgaca

SEQ ID NO: 5240 - DNA, 50 bp, Homo sapiens
ccgccttggggagacaggtcttgattgtctttttcccagtgaacattgtt

SEQ ID NO: 5241 - DNA, 50 bp, Homo sapiens
tcccagactttcaggaaagtaactgtagcactgttaatatcacaacaaca

SEQ ID NO: 5242 - DNA, 50 bp, Homo sapiens
ttttagctgggagtggggggactatggggaataactttccttcatttaat

SEQ ID NO: 5243 - DNA, 50 bp, Homo sapiens
acatgtgtgtgttttccatgaggcactgctttttatgcatttccctcccc

SEQ ID NO: 5244 - DNA, 50 bp, Homo sapiens
ctgtatttgaagtcagcagggctcagcaggatttgaccgacagttacctc

SEQ ID NO: 5245 - DNA, 50 bp, Homo sapiens
tggtttatagatgcacttcctttcataggcagtccctggcactttcttgc

SEQ ID NO: 5246 - DNA, 50 bp, Homo sapiens
aggagctggtattattggagggtattatagatccagtgtattgtgactgt

SEQ ID NO: 5247 - DNA, 50 bp, Homo sapiens
gcagtagtgctaaggcgtcttttgtaggctttagattttgtcgttatggc

SEQ ID NO: 5248 - DNA, 50 bp, Homo sapiens
gcttgtcagaacagaagatatttccaccctgcctagtagatgtgtttcag

SEQ ID NO: 5249 - DNA, 50 bp, Homo sapiens
cccccgttttaggttagggccttgggcaggggtttgccccctgttacccc

SEQ ID NO: 5250 - DNA, 50 bp, Homo sapiens
ttggttttatttatccaaaactgagccttctcataggctttacacccgga

SEQ ID NO: 5251 - DNA, 50 bp, Homo sapiens
ggcaggctctagccaccctgtcggttcccaataagccatttattgaataa

SEQ ID NO: 5252 - DNA, 50 bp, Homo sapiens
tttttgaccagtctacatttcgtatctgtgggatctgcatttgtgaattc

SEQ ID NO: 5253 - DNA, 50 bp, Homo sapiens
tctggacaatgttgatgctaaccttgatgatatccatccctattactggg

SEQ ID NO: 5254 - DNA, 50 bp, Homo sapiens
aggacatgaaggtctgaaaaagaaacaggaaaatacagacatccccgctt

SEQ ID NO: 5255 - DNA, 50 bp, Homo sapiens
aagtcaaggaaccctctcgggtctctgagatccaggccaacagtaaacag

SEQ ID NO: 5256 - DNA, 51 bp, Homo sapiens
agggggctttaaaatttaaaaattgccttttgttttaaaaaaggcccatgt

SEQ ID NO: 5257 - DNA, 50 bp, Homo sapiens
ccccctcccacccaaagaaaaagaaatggtaactacctggacaaaacatt

SEQ ID NO: 5258 - DNA, 50 bp, Homo sapiens
cccttggctcttattgttcttgctggtgtggtatgttcccggctgaaaaa

SEQ ID NO: 5259 - DNA, 50 bp, Homo sapiens
ttccccttttttcccccttttttaaaaagccccttttttaaatggggcgc

SEQ ID NO: 5260 - DNA, 50 bp, Homo sapiens
aaggacagcttgcttgctgatgaacacttccacagtcttttgagctaagt

SEQ ID NO: 5261 - DNA, 51 bp, Homo sapiens
acatgagaattaaccatgtccagtagttaagttcattttcctacagtgtgc

SEQ ID NO: 5262 - DNA, 50 bp, Homo sapiens
gccagaatggtacagagtggagggtgttctgctaatgacttcagagaagt

SEQ ID NO: 5263 - DNA, 50 bp, Homo sapiens
gcacaacttctgggaatctagtggctgtatgttaaagcatcggtaaaaga

SEQ ID NO: 5264 - DNA, 50 bp, Homo sapiens
aaaaaggccccttgtttgttggtttttggcccgttggggaaaatgcctgt

SEQ ID NO: 5265 - DNA, 50 bp, Homo sapiens
tttaggagctgaccatacatgatgagtgatacagcctgtactttgctcat

SEQ ID NO: 5266 - DNA, 50 bp, Homo sapiens
ggtttcccacgaacgggaggctgctgaagagtcaaagcctgggcagactc

SEQ ID NO: 5267 - DNA, 50 bp, Homo sapiens
caggtcatgagtattccaagctcaggtggtgagtcctcctcaccgggatg

SEQ ID NO: 5268 - DNA, 50 bp, Homo sapiens
aaagggaaactggctctggcaccacctactggagaccaaacttcaccaaa

SEQ ID NO: 5269 - DNA, 50 bp, Homo sapiens
gacaaaatagttacctatgctttccttctggcaccccgaatgtacgcagg

SEQ ID NO: 5270 - DNA, 50 bp, Homo sapiens
atctgacctgagggagatcacaaatgccttctgtattgggtggtaatgat

SEQ ID NO: 5271 - DNA, 50 bp, Homo sapiens
tccgttgtaacacatctaatgtgaacgcattataaacatggacctgtact

SEQ ID NO: 5272 - DNA, 51 bp, Homo sapiens
acataactattccgttgatgaatagcatcaggacttaaatggtgaccttgt

SEQ ID NO: 5273 - DNA, 51 bp, Homo sapiens
aacgggtttgggtttgggggggtttgttctttttattgaatccatttaagt

SEQ ID NO: 5274 - DNA, 50 bp, Homo sapiens
tataggagatgggatactcattcccgctgctattgataaggtcggaggcg

SEQ ID NO: 5275 - DNA, 50 bp, Homo sapiens
cagaacgtcctcaaggacacactcctccctcgggcctcactctggagcac

SEQ ID NO: 5276 - DNA, 50 bp, Homo sapiens
ctggacatgttgtttccatgttcagtcccttcccggtttttgggtgtttt

SEQ ID NO: 5277 - DNA, 50 bp, Homo sapiens
aaagtagccatcctgagtctccagggtgatgagcggacttgggtgtggat

SEQ ID NO: 5278 - DNA, 50 bp, Homo sapiens
ccttccatctcatcggtggcctctcactgtggctcactgtttaacacatg

SEQ ID NO: 5279 - DNA, 50 bp, Homo sapiens
tgttcaaggtcacatagtttaggtaagaagctcaaacctgagttttaggt

SEQ ID NO: 5280 - DNA, 50 bp, Homo sapiens
cacctgattccccctcttgcccacaggactctgctgttgttttcattctg

SEQ ID NO: 5281 - DNA, 50 bp, Homo sapiens
tctcgtgaggtgatgtggtgctgcagacttaagctatctgccttgaagat

SEQ ID NO: 5282 - DNA, 50 bp, Homo sapiens
aacaagcctggaataatgcccccaaagattgagtggaaatcgcccctttt

SEQ ID NO: 5283 - DNA, 50 bp, Homo sapiens
caggaccagatggcccaggaggaagtggatgctttcttggtagggaatgg

SEQ ID NO: 5284 - DNA, 50 bp, Homo sapiens
cctcctgctagaagacagatttcttccttggctgacaggctgaattaagc

SEQ ID NO: 5285 - DNA, 50 bp, Homo sapiens
aatttccaaaaacaaaacaaaacaagcaggtttcatggagcccgagtcca

SEQ ID NO: 5286 - DNA, 50 bp, Homo sapiens
cctttatgcaagttgtaaggggttgaccagtaaagaggaagttttgcccc

SEQ ID NO: 5287 - DNA, 50 bp, Homo sapiens
agtattagctacaaacaagccttgtttcctcttggctgtcaggcactgct

SEQ ID NO: 5288 - DNA, 50 bp, Homo sapiens
aagccccagtaaggtgttcaggactggtaaacgactgtcctcaagtaagg

SEQ ID NO: 5289 - DNA, 50 bp, Homo sapiens
tggttcaggtagtaaatgcttttggtcacatcagaactctagatctgggg

SEQ ID NO: 5290 - DNA, 50 bp, Homo sapiens
gcctgggctgtttttgctatatgtaaataaagcccttgggtctttatttt

SEQ ID NO: 5291 - DNA, 50 bp, Homo sapiens
ggaggttaggaagcccttttaaagtacaaacccccggcatggggaatttt

SEQ ID NO: 5292 - DNA, 50 bp, Homo sapiens
aacgggagtgatcgggaagtgaacagtttcatcatctgctgctgctattc

SEQ ID NO: 5293 - DNA, 50 bp, Homo sapiens
ctggtatgttgctttgtaggggaaaaactaattttgttgggtcagggaca

SEQ ID NO: 5294 - DNA, 50 bp, Homo sapiens
ccggacaagccatttgatgttctagtttgcaattactccacgcaaagtgg

SEQ ID NO: 5295 - DNA, 50 bp, Homo sapiens
tttgggcatcaacttcaacaactactaccaggacgcctgagggtgctttt

SEQ ID NO: 5296 - DNA, 50 bp, Homo sapiens
tcgaagaaagtacctgtaaatgtagagtaattgcgaagctgtcaggaata

SEQ ID NO: 5297 - DNA, 50 bp, Homo sapiens
tcctagaccctgcattgtgaaatggggcttgaattttagttctgaatttt

SEQ ID NO: 5298 - DNA, 50 bp, Homo sapiens
ctaaagcagtgtctgacctggatttgctgccaatttgtaagctttcatga

SEQ ID NO: 5299 - DNA, 50 bp, Homo sapiens
ggagctgagcagggatgcaaaaccatccagtctgtaagattcacagagac

SEQ ID NO: 5300 - DNA, 50 bp, Homo sapiens
aaacggtgtttgagctgctttgggaaaacccatgttgcagattttcaggt

SEQ ID NO: 5301 - DNA, 50 bp, Homo sapiens
cagagctgtgtttcctcaacaagtgtgcgagcggtcgtgtgcgccatgag

SEQ ID NO: 5302 - DNA, 50 bp, Homo sapiens
aaatcgcttctgtattgttaatagcaatatatgacctctgctgtcctcct

SEQ ID NO: 5303 - DNA, 50 bp, Homo sapiens
gaaaggataatttcgaacccttgcatagtttcggtatgggccgtgccaac

SEQ ID NO: 5304 - DNA, 50 bp, Homo sapiens
ccctcttgaactgcactgcctaagaaatgttggttgcatggagacatatt

SEQ ID NO: 5305 - DNA, 50 bp, Homo sapiens
tctgccttatttggcttggaagagaaaccgataaacactcccgtgctagt

SEQ ID NO: 5306 - DNA, 50 bp, Homo sapiens
aaacagcagaaaagtaatttctggtgaactgatgagaattccctattgca

SEQ ID NO: 5307 - DNA, 50 bp, Homo sapiens
aggttgttttggaaaaattatttgttttgtcctaaggggtcctgcccacc

SEQ ID NO: 5308 - DNA, 52 bp, Homo sapiens
cctccggaacgtttttaaaaaggaaaaagcccgggttttcccttgggaaaaa

SEQ ID NO: 5309 - DNA, 50 bp, Homo sapiens
cagacctgtgggctgattccagactgagagttgaagttttgtgtgcatca

SEQ ID NO: 5310 - DNA, 50 bp, Homo sapiens
accaagtttgaatttgtcaaatcccaagtcaatccaggatgttcatttct

SEQ ID NO: 5311 - DNA, 50 bp, Homo sapiens
agtgatctgcctttcagcaactgtcttattttggttctttgaaactgtga

SEQ ID NO: 5312 - DNA, 50 bp, Homo sapiens
tttgaatggctgaagctaaggcaacgttagtttctccttactctgctttt

SEQ ID NO: 5313 - DNA, 50 bp, Homo sapiens
acctttgtgattctgtctagtgaaaatgggacatttttaatagtgccaga

SEQ ID NO: 5314 - DNA, 50 bp, Homo sapiens
gaacttgcccctaaactgggttaaatggaccctgttgagttttctggaca

SEQ ID NO: 5315 - DNA, 50 bp, Homo sapiens
taaattgggcaaagttttttatggaatttccggggcaaggttttgggggc

SEQ ID NO: 5316 - DNA, 50 bp, Homo sapiens
aaatctcatttgcaagttctcccattaagcaagggagtagtttactagga

SEQ ID NO: 5317 - DNA, 50 bp, Homo sapiens
aagaaaggcccataacagatggcaaaatagaggattggtgagggatatgc

SEQ ID NO: 5318 - DNA, 50 bp, Homo sapiens
aaaaccattccagcttaatgcctttaattttaatgccaacaaaattgggg

SEQ ID NO: 5319 - DNA, 50 bp, Homo sapiens
tgcaaccttcttaaaatgtgggctactggagatcatgccactgcactcca

SEQ ID NO: 5320 - DNA, 50 bp, Homo sapiens
agctcagatgggtccccaaaagaggcataggaaagcgcgacctcactgcc

SEQ ID NO: 5321 - DNA, 50 bp, Homo sapiens
caaataaaaaggctggggccaaaggtgggcaccaaaagtcctcctatgtg

SEQ ID NO: 5322 - DNA, 50 bp, Homo sapiens
tgcagctcccatttcctgagcgtctaccaggtactaggagaactcttaca

SEQ ID NO: 5323 - DNA, 50 bp, Homo sapiens
attatccttttccccaggaagccctcggcccccaaaaagggaaacagttt

SEQ ID NO: 5324 - DNA, 50 bp, Homo sapiens
catgagcccaggggtttcatgacaaacattactagcatgttcaactgccc

SEQ ID NO: 5325 - DNA, 50 bp, Homo sapiens
gcccggtttatggaaaaaccaggaccagtttatgtttggggttttgggaa

SEQ ID NO: 5326 - DNA, 50 bp, Homo sapiens
gcttggtactgtcatagtgattacaaatttcatggaatgcgaagagcaac

SEQ ID NO: 5327 - DNA, 50 bp, Homo sapiens
ttttctcccctctcttccccttccacgaactgcaataccagtaaccttgg

SEQ ID NO: 5328 - DNA, 50 bp, Homo sapiens
aagcccagatacacaaaattccaccccatgatcaagaatcctgctccact

SEQ ID NO: 5329 - DNA, 50 bp, Homo sapiens
catgtgttgactctgtaatggatttatgtagcccacttcagtctgcaaat

SEQ ID NO: 5330 - DNA, 50 bp, Homo sapiens
aggggtgtcccttttccccttcatgtaaaattctaactggggctaccagt

SEQ ID NO: 5331 - DNA, 50 bp, Homo sapiens; identical to SEQ ID NO: 4387

SEQ ID NO: 5332 - DNA, 50 bp, Homo sapiens
tgaagaaactgccctttctgtgatgtttttgaatactacccaacagccaa

SEQ ID NO: 5333 - DNA, 50 bp, Homo sapiens
cttcctagccctaagtttggcctttgggtggctccaaaaaggattaggtt

SEQ ID NO: 5334 - DNA, 50 bp, Homo sapiens
tccccctcgttttgtagggtttgtacataataaaacaatggggtggggcc

SEQ ID NO: 5335 - DNA, 50 bp, Homo sapiens
tgttaagtgtgaggttttctgaacccttagcagaaggacttttaatgttt

SEQ ID NO: 5336 - DNA, 50 bp, Homo sapiens
agttccactgctgttcctcttaccttgattaaatgcctatgcatgtactt

SEQ ID NO: 5337 - DNA, 50 bp, Homo sapiens
agttctgttgtgtaatctggtgctggttccctgggcatatgtattctgtg

SEQ ID NO: 5338 - DNA, 50 bp, Homo sapiens
cccccttgcttggttttaagtaggtatggaatgttattataggccatagt

SEQ ID NO: 5339 - DNA, 50 bp, Homo sapiens
tcagtgtaaacataattaggccgtgagtttttgctcttactcccaggttt

SEQ ID NO: 5340 - DNA, 50 bp, Homo sapiens
tgtaaacttgttttaacaactcttttcaacattttggccggggtattccc

SEQ ID NO: 5341 - DNA, 50 bp, Homo sapiens
tgctgaaagtggtcccaaaggggtactagtttttaagctcccaactcccc

SEQ ID NO: 5342 - DNA, 50 bp, Homo sapiens
ttcccagttgccacagaccgtttatatgaagaaatgctaaagaagttccc

SEQ ID NO: 5343 - DNA, 50 bp, Homo sapiens; identical to SEQ ID NO: 4387

SEQ ID NO: 5344 - DNA, 51 bp, Homo sapiens
agttctaaagccgggaattcctaaggatatactaaatgagattatgtgtgg

SEQ ID NO: 5345 - DNA, 50 bp, Homo sapiens
gcctgggggaggagaagtcccttcccattccagctcgatcaatcttgctg

SEQ ID NO: 5346 - DNA, 50 bp, Homo sapiens
ggagtagagagagtcttgctacatgcgggaactagaattacatcactgcg

SEQ ID NO: 5347 - DNA, 50 bp, Homo sapiens
aagaagtttcattgatatccactggtcacatcatacctgtctatagggca

SEQ ID NO: 5348 - DNA, 50 bp, Homo sapiens
tgcttcaagcacaggatttatggaatagttggcaaattaaacaacatgct

SEQ ID NO: 5349 - DNA, 50 bp, Homo sapiens
cggcagccttatggaatgagtttcttgtcatgaatgttgtccccaaagct

SEQ ID NO: 5350 - DNA, 50 bp, Homo sapiens
acagttactttggagctgctagactggttttctgtgttggtaaattgcct

SEQ ID NO: 5351 - DNA, 50 bp, Homo sapiens
tgtgaagaatccctaccattaataccctgggtgggataaataaaaatggg

SEQ ID NO: 5352 - DNA, 50 bp, Homo sapiens
cccaaaatttgtttaaagttccgacttccaaaaggggccaataaaaaggg

SEQ ID NO: 5353 - DNA, 51 bp, Homo sapiens
caccgcctctgcctccgcctcttccactggagagcccgaggtcaaaaggtc

SEQ ID NO: 5354 - DNA, 50 bp, Homo sapiens
ccctcacctagcagtactaccacaataatgctatcatggtgccagggaat

SEQ ID NO: 5355 - DNA, 50 bp, Homo sapiens
tctccttccccattgggccgcctttatcaattgcctgttttgttttgttt

SEQ ID NO: 5356 - DNA, 50 bp, Homo sapiens
tttttatctttcttggtgggggtgtggtggtggtgaagaggacctaaaaa

SEQ ID NO: 5357 - DNA, 50 bp, Homo sapiens
cgccagaggtcagaacatgtctattttgaattggatcgttacaaatgagc

SEQ ID NO: 5358 - DNA, 50 bp, Homo sapiens
gcaggcactgacatttttgagcaaagacgtgatgttatgagataaatatc

SEQ ID NO: 5359 - DNA, 50 bp, Homo sapiens
ttctgacacgattacacaacgaggctttaatgccatttgggtaggtgagc

SEQ ID NO: 5360 - DNA, 51 bp, Homo sapiens
ttttaaaggggaggggccggggtttggtccccggtcccaaaggtaaaagtt

SEQ ID NO: 5361 - DNA, 50 bp, Homo sapiens
gagtgagaagaggcttttaaggaccatgtgaagaggcttttaaacacttt

SEQ ID NO: 5362 - DNA, 50 bp, Homo sapiens
gggttgggataaactgcttagatgtttgcctacttgtccagtgaaattac

SEQ ID NO: 5363 - DNA, 50 bp, Homo sapiens
actgaaaagttgaaagacttttgcagtgaacatttatataactccccgct

SEQ ID NO: 5364 - DNA, 50 bp, Homo sapiens
attcataggtagtgcccagagagagtacaagctctgactcatatggcagt

SEQ ID NO: 5365 - DNA, 50 bp, Homo sapiens
acatgttacctggagtagctgtgtcaacagattaatatggaatgctacta

SEQ ID NO: 5366 - DNA, 50 bp, Homo sapiens
tggttcctgtgctcaccatagggctggtgtacattgggccattaataaac

SEQ ID NO: 5367 - DNA, 50 bp, Homo sapiens
acagatccctattgccagacacatcattctctccatccagaaagcaaaca

SEQ ID NO: 5368 - DNA, 50 bp, Homo sapiens
tctgggaaagacatttttaagctgctgacttcacctgcaaaatctaacag

SEQ ID NO: 5369 - DNA, 50 bp, Homo sapiens
agtcacgataaacctggtcacctgaaaattgaaattgagccacttccttg

SEQ ID NO: 5370 - DNA, 50 bp, Homo sapiens
aaactggcggcccaacaaaacagtgggttaaatgggtccctgggtgacat

SEQ ID NO: 5371 - DNA, 50 bp, Homo sapiens
agtgtttcctccacatctaaagaaagcccattttgaaactggatactgca

SEQ ID NO: 5372 - DNA, 50 bp, Homo sapiens
cccaggtggcccctctccatcagatgttattgctcttccccatttattta

SEQ ID NO: 5373 - DNA, 50 bp, Homo sapiens
aagatgcctaagcgttaaccaggtgaaacaggggtgggagagagaaagaa

SEQ ID NO: 5374 - DNA, 50 bp, Homo sapiens
gtcatacacctatcccccattttcctcctatccctcaacccggacatcat

SEQ ID NO: 5375 - DNA, 50 bp, Homo sapiens
gcaggtggcagaatggggtgcatgaaggtttctgaaaattaacactgctt

SEQ ID NO: 5376 - DNA, 50 bp, Homo sapiens
acagagaggcagcatttgttttccagttaaaatttgacctcactgtgatt

SEQ ID NO: 5377 - DNA, 50 bp, Homo sapiens
cccccttttgttgtggttttatattggaaccccctttttctttggaacta

SEQ ID NO: 5378 - DNA, 50 bp, Homo sapiens
ctgaccccttcctcacccctgccaacagtggtggcatatatcacaaatgg

SEQ ID NO: 5379 - DNA, 50 bp, Homo sapiens
tgttttacctcactgttggacatacattccaagcttttcaactctaggag

SEQ ID NO: 5380 - DNA, 50 bp, Homo sapiens
cagaacatgcccaaagaagcctatatcttgctgctgggaaatgtaaagca

SEQ ID NO: 5381 - DNA, 50 bp, Homo sapiens
caaacaccggcagttgaaaggaaaaggacggggaatgtgatggaaaagag

SEQ ID NO: 5382 - DNA, 50 bp, Homo sapiens
ccccctccctgccccggtgagctttggggaacccaaaaattagattttgc

SEQ ID NO: 5383 - DNA, 50 bp, Homo sapiens
cccaaatccaaggaccaatgctgttgtaaacaaggggtaaagggcctaaa

SEQ ID NO: 5384 - DNA, 50 bp, Homo sapiens
actccaccaagactgtgaactccaccggggtaggaagcatattttactca

SEQ ID NO: 5385 - DNA, 50 bp, Homo sapiens
gagaactcgtttcaaggaactcgatgtttccggggaccaagcccgcccag

SEQ ID NO: 5386 - DNA, 50 bp, Homo sapiens
ccagcgaatttccagcttttgaaactcagatttccttttgcgacccaggt

SEQ ID NO: 5387 - DNA, 50 bp, Homo sapiens
gatgcgcggcaagaatgtacctgtagatgtgtacataccacagtgctgta

SEQ ID NO: 5388 - DNA, 50 bp, Homo sapiens
tttatctcagaatcttgatgaactctgaaatgacccctgatgggggcatg

SEQ ID NO: 5389 - DNA, 50 bp, Homo sapiens
ggccccctgtccttacctgttttcggcccccttaattttttaaccccggg

SEQ ID NO: 5390 - DNA, 50 bp, Homo sapiens
gtcacagtgtagacacatggtgcttccatagtgagtagaatatccattgt

SEQ ID NO: 5391 - DNA, 50 bp, Homo sapiens
gtggcctggcctggctctcacagacccaaggcttccgtgtagaatatgtc

SEQ ID NO: 5392 - DNA, 50 bp, Homo sapiens
ggattgtggcaggaactgtttcccctcccagccttaaatttttctgtgtt

SEQ ID NO: 5393 - DNA, 50 bp, Homo sapiens
aaacccacacctcagtgaatttaaaagagtagatgttttaaaagaccgga

SEQ ID NO: 5394 - DNA, 51 bp, Homo sapiens
tgccatttggtattttttcctgaaacattacataataagaatgcagcatgc

SEQ ID NO: 5395 - DNA, 50 bp, Homo sapiens
gcctgaaaccatcctgccttctaggaagacagcaattctggaagagcaag

SEQ ID NO: 5396 - DNA, 50 bp, Homo sapiens
ggtggttccccagcccttttccctggccctgggttggaaaatttgttttc

SEQ ID NO: 5397 - DNA, 51 bp, Homo sapiens
aaaacctttcgcccggcttaaaatttaccggggtttggttttatttggttt

SEQ ID NO: 5398 - DNA, 50 bp, Homo sapiens
ctccttggtgtcatgcaactgaggaacctaattggctgggtgggttgttc

SEQ ID NO: 5399 - DNA, 50 bp, Homo sapiens
gtttgtaaaagaacctgccacatttgttgaaaagttagagccatcacagc

SEQ ID NO: 5400 - DNA, 50 bp, Homo sapiens
ctcttggctgctggccttttgttcttgtcatggctcattagctccctaaa

SEQ ID NO: 5401 - DNA, 50 bp, Homo sapiens
ccaggggtttttaaattttctgaagtttttggggccattttggttgttgg

SEQ ID NO: 5402 - DNA, 50 bp, Homo sapiens
ccccgcttgccttttatttcagaaccccaagtattacccaatatgttaca

SEQ ID NO: 5403 - DNA, 50 bp, Homo sapiens
gccgaagctcacagaggctaagttacacgcttaggtgttcttattcctac

SEQ ID NO: 5404 - DNA, 50 bp, Homo sapiens
aaccaggtttatgatgctgtaataaaccatggcattaaagagggcaagag

SEQ ID NO: 5405 - DNA, 50 bp, Homo sapiens
gggttaaggagggccgctccaaaattttcctttttcccaggaagcccttg

SEQ ID NO: 5406 - DNA, 50 bp, Homo sapiens
atgctgtgagtggtacacatggctgaggttatgatctgttaaaatatgta

SEQ ID NO: 5407 - DNA, 50 bp, Homo sapiens
ttcattaattcctcaacccaatactgtctggcttccaccaacaggagcgg

SEQ ID NO: 5408 - DNA, 50 bp, Homo sapiens
tggtttctattttaaaaacctgggttaggccaaggtttggggttcgccct

SEQ ID NO: 5409 - DNA, 50 bp, Homo sapiens
caacattgcctaccagttgcagttcattagccccgtccgccccagcattg

SEQ ID NO: 5410 - DNA, 50 bp, Homo sapiens
cctttggggtgggggctttttcctttttggccggttcaattaaggttttt

SEQ ID NO: 5411 - DNA, 50 bp, Homo sapiens
cccactccggctgttttagaagttttcccgaatccgtgatccctttacaa

SEQ ID NO: 5412 - DNA, 50 bp, Homo sapiens
aatgggcaaattttacccaaaacttaagcttgcctattccgtttgaggca

SEQ ID NO: 5413 - DNA, 50 bp, Homo sapiens
gaaggagaggcacacacaaatacacacactcacacaaaactcaacaacca

SEQ ID NO: 5414 - DNA, 50 bp, Homo sapiens
ggataccccctttatcccgagggaatttttaccctttggatgcctttaaa

SEQ ID NO: 5415 - DNA, 50 bp, Homo sapiens
caaattacaaacctaaaaatacagaacatcagcggagaagacaggagagc

SEQ ID NO: 5416 - DNA, 50 bp, Homo sapiens
ctcctcccttgggtgggacctgggttgggggtttgatagaaaaattaacc

SEQ ID NO: 5417 - DNA, 50 bp, Homo sapiens
ggttaaactagatccctgcaaggccatcacctccattccaagttgttact

SEQ ID NO: 5418 - DNA, 50 bp, Homo sapiens
agtgggttattttagatcttttcctggggttcaggtcacatagcttaact

SEQ ID NO: 5419 - DNA, 50 bp, Homo sapiens
tgtttgggtatattgtttgggttttgggcactaggatgggtgactcaggg

SEQ ID NO: 5420 - DNA, 50 bp, Homo sapiens
gccagtgaatctagttttggctattctgtattttgtccagtttttcccat

SEQ ID NO: 5421 - DNA, 50 bp, Homo sapiens
aaccattttcccccgggaacccgttttgcctggtttcggattttttaccc

SEQ ID NO: 5422 - DNA, 50 bp, Homo sapiens
ccgggaagcggggtactggctgtgtttaatcattaaaggtaccgtgtccg

SEQ ID NO: 5423 - DNA, 50 bp, Homo sapiens
tttttccccctcccaaattcactgcattacagtttttgaaacagaacggg

SEQ ID NO: 5424 - DNA, 50 bp, Homo sapiens
tacgagaagtcaggaagttttgaaatggcagtgacaggagacgggggaag

SEQ ID NO: 5425 - DNA, 50 bp, Homo sapiens
aagggcaggcaaatcaattaaaattagccgtaacaacaacctcgggggtg

SEQ ID NO: 5426 - DNA, 50 bp, Homo sapiens
agtacacggccctcaaaagttatatgtgctgaatgtaacctacttagcga

SEQ ID NO: 5427 - DNA, 51 bp, Homo sapiens
ttgttttaacaactcttctcaacattttgtccaggttattcactgtaacca

SEQ ID NO: 5428 - DNA, 50 bp, Homo sapiens
cttctccacctcggccaggtatagggccagcttctcgtctctgggatccg

SEQ ID NO: 5429 - DNA, 50 bp, Homo sapiens
gccaggtcattgtatagggagtaagatgaaggtgaatttgcagctagttg

SEQ ID NO: 5430 - DNA, 50 bp, Homo sapiens
tgtgttttgtttttctggtcccagggcaccgtttgttttgtgaactcctc

SEQ ID NO: 5431 - DNA, 50 bp, Homo sapiens
catggctctaaaatttggaattaacttctcttgccttaagagctgcttgt

SEQ ID NO: 5432 - DNA, 50 bp, Homo sapiens
gctggtgggaagttgagccatgtttatctctagtggaatccttaccttgt

SEQ ID NO: 5433 - DNA, 50 bp, Homo sapiens
catgtttacacaaattccttcaaagccccttaaacatggggccgggcccc

SEQ ID NO: 5434 - DNA, 50 bp, Homo sapiens
accctaatagctaggctgggtatattttcaaagtgtagcgaaaccccacg

SEQ ID NO: 5435 - DNA, 50 bp, Homo sapiens
cagttggcctcctacaattgggaattctaccaagctccaagttgacctgg

SEQ ID NO: 5436 - DNA, 50 bp, Homo sapiens
ggattcccgacaaaggcttgatgtgtacttgaagtgagcaaagggttttg

SEQ ID NO: 5437 - DNA, 50 bp, Homo sapiens
gggtgggagacaggctaatcctttccccttgttttccacgtctttatgac

SEQ ID NO: 5438 - DNA, 51 bp, Homo sapiens
acaaccttcttaatatattagagacccgcaggaaacatttagtggtgaaac

SEQ ID NO: 5439 - DNA, 51 bp, Homo sapiens
gtacatgtttgtgtgctaaattgctcatttggcagtgatagattgaaaaac

SEQ ID NO: 5440 - DNA, 50 bp, Homo sapiens
gggggtcaaagagggtacaaatgtatgggggtatattgaatgctaaacat

SEQ ID NO: 5441 - DNA, 50 bp, Homo sapiens
gggagcccgttttagaaggaagggcaaaagtagggtttttaacccaaacg

SEQ ID NO: 5442 - DNA, 50 bp, Homo sapiens
tccgtcccattcccccggaaaacaaggttttgaattggcccgtaaaaggg

SEQ ID NO: 5443 - DNA, 50 bp, Homo sapiens
acgtccttatacaatgcactgtttgatttttaaacaatacctgaagggct

SEQ ID NO: 5444 - DNA, 50 bp, Homo sapiens
actcaatactcgggaaaggcttcacatttctgggactcagcattatccaa

SEQ ID NO: 5445 - DNA, 50 bp, Homo sapiens
ttgagaggcaacacttaaacactagggctactgtggcatctatgtagaca

SEQ ID NO: 5446 - DNA, 50 bp, Homo sapiens
agccctttcttgttgctgtatgtttagatgctttccaatcttttgttact

SEQ ID NO: 5447 - DNA, 50 bp, Homo sapiens
ggggtatggtttagtaatatccaccagaccttccgatccagcagtttggt

SEQ ID NO: 5448 - DNA, 50 bp, Homo sapiens
aacaacaacagcaaaatccccttagtgcgtaacttgaaattcccttcggc

SEQ ID NO: 5449 - DNA, 50 bp, Homo sapiens
ttgtaagtgggtgcataagaagatctcttcaattaaatgcccccgctggt

SEQ ID NO: 5450 - DNA, 50 bp, Homo sapiens
ataattaagaaatcagccgtgtgcttctcacgtttgggctccgagacgtg

SEQ ID NO: 5451 - DNA, 50 bp, Homo sapiens
gtcagtctcctcacctgcctctgctcctcgcttagcccattgattgcatc

SEQ ID NO: 5452 - DNA, 50 bp, Homo sapiens
gggaagaagcccgtgcccccacccaataaatgttggttttggccctgatg

SEQ ID NO: 5453 - DNA, 50 bp, Homo sapiens
cagaacttctggcgaaggccatgtaagaactactccaaggaggaagaggc

SEQ ID NO: 5454 - DNA, 50 bp, Homo sapiens
ctctaccataaggcactatcagagactgctactggagtgtatatttggtt

SEQ ID NO: 5455 - DNA, 50 bp, Homo sapiens
actgctacagcttaaccattgttccaagctaattaaattacctttgggga

SEQ ID NO: 5456 - DNA, 50 bp, Homo sapiens
caattgtgatttggaaggtttaactgggtctgcccagatgtttacgaata

SEQ ID NO: 5457 - DNA, 50 bp, Homo sapiens
tccaagcaaaagttatgcaataagacagaatataaagtctccgagagcct

SEQ ID NO: 5458 - DNA, 50 bp, Homo sapiens
gggtggggtggggtgagagtgtgtggagtaaggaccttcagaattaatat

SEQ ID NO: 5459 - DNA, 51 bp, Homo sapiens
tgcagttcttattttcttttgcctgtgataattgcaaatccgtcaatagaa

SEQ ID NO: 5460 - DNA, 50 bp, Homo sapiens
tgcaagtttctgagactgtgaaaagtgttttgcttcttttgttacccaat

SEQ ID NO: 5461 - DNA, 50 bp, Homo sapiens
tcccagcgaatgtgaatcatttagtgtgctactcaaaattaggtgtccac

SEQ ID NO: 5462 - DNA, 50 bp, Homo sapiens
taagatgtaggggccaccggccagcagtacccagcaatgaccactatcag

SEQ ID NO: 5463 - DNA, 50 bp, Homo sapiens
ataaatgaaagcataccaagtgctgtccattccataggtacaactatgga

SEQ ID NO: 5464 - DNA, 50 bp, Homo sapiens
ctggtattctgaggtcagatgtaggctgttgctcgctccggctgggtctc

SEQ ID NO: 5465 - DNA, 50 bp, Homo sapiens
ccatcgggggtattggggttttgggctgaatttacttgattattggaaaa

SEQ ID NO: 5466 - DNA, 50 bp, Homo sapiens
gccagattgtggcaggtaaagagacaatgtaatttgcactccctatgata

SEQ ID NO: 5467 - DNA, 50 bp, Homo sapiens
tttaaaaaggagggaggatttctgggttaaaacttttatttggcccccat

SEQ ID NO: 5468 - DNA, 50 bp, Homo sapiens
taaaacccaagacttcagattcagccgaattgtggtgtttcacaaggccg

SEQ ID NO: 5469 - DNA, 50 bp, Homo sapiens
ctaagcatggggaagggggcagagtgaggactgtgccattgattaaagtg

SEQ ID NO: 5470 - DNA, 50 bp, Homo sapiens
gtacagaaacatattccatgctttgaaataaagggaagtgctctcctgtt

SEQ ID NO: 5471 - DNA, 50 bp, Homo sapiens
gaagccttttcttttctgttcaccctcaccaagagcacaacttaaatagg

SEQ ID NO: 5472 - DNA, 51 bp, Homo sapiens
accgatcgtttttaggataatatgcatgtttcaagtggtattgaaaccccc

SEQ ID NO: 5473 - DNA, 50 bp, Homo sapiens
tgagggacaggctgcctaaagtctaattggagagttaacctaatgtctgt

SEQ ID NO: 5474 - DNA, 50 bp, Homo sapiens
caccatcgtggctctgagaactgacgccgtgaatgttgacctgagtgccg

SEQ ID NO: 5475 - DNA, 50 bp, Homo sapiens
ggggagagaccaccctagacatttgcatttttgtaagttagccagccaat

SEQ ID NO: 5476 - DNA, 50 bp, Homo sapiens
tggataaatctgagcaactttcttctttgtgctccaggaacctacgcact

SEQ ID NO: 5477 - DNA, 50 bp, Homo sapiens
tgtgggttttgattgacatactgttgttcatgctgaagtttgagtgtcgt

SEQ ID NO: 5478 - DNA, 50 bp, Homo sapiens
ggtgtgcagtccgcctgaaagccttccctttagctattaggaattgagtc

SEQ ID NO: 5479 - DNA, 53 bp, Homo sapiens
acattggaaagaaaccctacaactgtaatgaatatgaaaagaattgtctaaaa

SEQ ID NO: 5480 - DNA, 50 bp, Homo sapiens
aaaaccgttttccccatacataaagaacaggggtactcccgccctgatgg

SEQ ID NO: 5481 - DNA, 50 bp, Homo sapiens
tttggtgaagtgaaagagagaagttgctctaaaaggttggaaaccagccc

SEQ ID NO: 5482 - DNA, 50 bp, Homo sapiens
tggactgttgtaatgttttgcgttatcaaaatgaaaactgccaaatgaga

SEQ ID NO: 5483 - DNA, 50 bp, Homo sapiens
gctttgagttttgggatggtcacatgacacaatccagcacttgaacctga

SEQ ID NO: 5484 - DNA, 50 bp, Homo sapiens
agagccattcccacaaagtaaatgtgcagtgcccatgtttcttgtgttta

SEQ ID NO: 5485 - DNA, 50 bp, Homo sapiens
gactctgagagagagcgacggccatcatagaacagcgaaggcagtcgatc

SEQ ID NO: 5486 - DNA, 50 bp, Homo sapiens
atcgatgagaagagtctgcaaaacacttcatcctcaggacgtgctgtcct

SEQ ID NO: 5487 - DNA, 50 bp, Homo sapiens
atatattaaaccacaggtattagagacatgaattgcacccaacacaagct

SEQ ID NO: 5488 - DNA, 50 bp, Homo sapiens
attcattcgggtcttcctttcttccgcccccttccttccattggcacctc

SEQ ID NO: 5489 - DNA, 50 bp, Homo sapiens
tcagttttgtggaatctggtgtttgcactataggttaagagttgccattt

SEQ ID NO: 5490 - DNA, 50 bp, Homo sapiens
tgtgtggtgggggtgcttttgaggttggaggaaagtagagacagcgaaac

SEQ ID NO: 5491 - DNA, 50 bp, Homo sapiens
tgtgctttttgcccaagtggtaattcatcttggtttgctatgttaaaact

SEQ ID NO: 5492 - DNA, 50 bp, Homo sapiens
ctttggggacctaaaccccaggtggtctcttggtgttaataatgctggaa

SEQ ID NO: 5493 - DNA, 50 bp, Homo sapiens
aaatcgcggtcgccttaatccaagcctaggttttcacacttttagtaagc

SEQ ID NO: 5494 - DNA, 50 bp, Homo sapiens
tggggcactttgaaaacttcacaggcccactgctgcttgctgaaataaaa

SEQ ID NO: 5495 - DNA, 50 bp, Homo sapiens
gacattcatctgtttccactgagtctgagtcttcaagttttcactccagc

SEQ ID NO: 5496 - DNA, 50 bp, Homo sapiens
tggcgaggataaatagaggcattgtttttgctactttgcatatcattggc

SEQ ID NO: 5497 - DNA, 50 bp, Homo sapiens
tggctctcctctttgtaatatacagggtgaactctttactgatacacaca

SEQ ID NO: 5498 - DNA, 50 bp, Homo sapiens
ccagtgtcctgcatgggtgctaggctgaattatttgtaattgtgcttagg

SEQ ID NO: 5499 - DNA, 50 bp, Homo sapiens
accgtcttttgtgattccctggaaacccttaattcaatagtcctgactga

SEQ ID NO: 5500 - DNA, 50 bp, Homo sapiens
agccctgggtagccaagtgattttcccattcccaaagttagtaaaccttt

SEQ ID NO: 5501 - DNA, 50 bp, Homo sapiens
gcaggaaagatggggtggtggactgtttttgcctactttttgtttttgaa

SEQ ID NO: 5502 - DNA, 50 bp, Homo sapiens
ccccctgaaactggcattttgtaaatgtggtttgactatttttgtatgtt

SEQ ID NO: 5503 - DNA, 50 bp, Homo sapiens
acctggagaattccctaaggccaaagcaaggtaacagggacttcagtttt

SEQ ID NO: 5504 - DNA, 50 bp, Homo sapiens
gcctcagtacaaagggggctttggaagtgtttgttggctgaataaaggaa

SEQ ID NO: 5505 - DNA, 50 bp, Homo sapiens
acccatgccaattgaagaacgtgttaaagatgaggaggagagatgtacca

SEQ ID NO: 5506 - DNA, 50 bp, Homo sapiens
gcacattccttccttatatcctggaagcacccagatattcttcatgtccc

SEQ ID NO: 5507 - DNA, 50 bp, Homo sapiens
ttaagtcatctgctgagcagtgtgctgtgtcaacctcctcctaggtaacc

SEQ ID NO: 5508 - DNA, 50 bp, Homo sapiens
cagggtatcagatattgtgccttttggtgccaggttcaaagtcaagtgcc

SEQ ID NO: 5509 - DNA, 50 bp, Homo sapiens
tggtaatagtgtttgactccagggaagaacagatgggtgccagagtgaaa

SEQ ID NO: 5510 - DNA, 50 bp, Homo sapiens
tcaagtataccatttaaaatatttcatcaggcagagccctgaccaggaaa

SEQ ID NO: 5511 - DNA, 50 bp, Homo sapiens
cttttccggttgcccgaggatgcttgggaaggaacccgtctcccttcttc

SEQ ID NO: 5512 - DNA, 50 bp, Homo sapiens
tccccaaacccccttaaaggtttttaaattgtttcaaatctgggcaagtt

SEQ ID NO: 5513 - DNA, 50 bp, Homo sapiens
gactcggagagccaggaggagaacacgcagctctgaactggctgagcgag

SEQ ID NO: 5514 - DNA, 50 bp, Homo sapiens
ctgttgtgaatcatttgtgtccttttcaactgtctttcagaggaaaggta

SEQ ID NO: 5515 - DNA, 50 bp, Homo sapiens
aagaagcaaccacagctaattttagaacatgcactctgacagaaaagaca

SEQ ID NO: 5516 - DNA, 50 bp, Homo sapiens
gcttttgaggacctttctggaggaaaggaaaagcctgttttggggagtct

SEQ ID NO: 5517 - DNA, 50 bp, Homo sapiens
aggctgcatatggattgccaagtcagcatatgaggaattaaagacattgt

SEQ ID NO: 5518 - DNA, 50 bp, Homo sapiens
aagactagagctacactaggccactatcttattacacgacagcacaacat

SEQ ID NO: 5519 - DNA, 50 bp, Homo sapiens
ttaagaaccccaaagattaaaggaaacaatgttaagggcttttgtgagga

SEQ ID NO: 5520 - DNA, 50 bp, Homo sapiens
cggaagtcgaaatcaaatctatgcttttaattgaaaccgtgcctgaaacg

SEQ ID NO: 5521 - DNA, 50 bp, Homo sapiens
tcttcaccaggttcaagctccgtgggccacactgctgctgtgccaagaag

SEQ ID NO: 5522 - DNA, 50 bp, Homo sapiens
gatacactgtccagcccaggtccaggccctaggttctttactctagctac

SEQ ID NO: 5523 - DNA, 50 bp, Homo sapiens
tggaatttactaaattgtgaaattaacgtaaccgaagcaacaaccggcaa

SEQ ID NO: 5524 - DNA, 50 bp, Homo sapiens
gcgggaggctgggactttccattacaaatagagacttcattcctgttgag

SEQ ID NO: 5525 - DNA, 50 bp, Homo sapiens
actcaggtggtgctggtgttagtgatgctggagaagagaatattactggt

SEQ ID NO: 5526 - DNA, 50 bp, Homo sapiens
caggttgctttcgtgtccctcttctggttgctttagaagtgacgtgtaat

SEQ ID NO: 5527 - DNA, 50 bp, Homo sapiens
aaacacagcccaccccatttcagaccgccttcctgaggagaaaatgacag

SEQ ID NO: 5528 - DNA, 50 bp, Homo sapiens
gctaactggataaagtttgtgcagacattcctgagtgtacgatattgacc

SEQ ID NO: 5529 - DNA, 50 bp, Homo sapiens; identical to SEQ ID NO: 5528

SEQ ID NO: 5530 - DNA, 50 bp, Homo sapiens
agctggcttcactgctcaggtgattatcctgaaccaccaggccaaataag

SEQ ID NO: 5531 - DNA, 50 bp, Homo sapiens
agtcaggactgtctaggtcagggaagccaagatgtctgaagagagaggaa

SEQ ID NO: 5532 - DNA, 50 bp, Homo sapiens
attcaaccagtaatggtacctgaggaattgaaatgggtatttgtttctgt

SEQ ID NO: 5533 - DNA, 50 bp, Homo sapiens
agtggagaggccctgttagtttacttttcatattgagtgatgcatgaggt

SEQ ID NO: 5534 - DNA, 50 bp, Homo sapiens
gcattctatttaaaaagggagtggggagcaaatgaaaattaaatgtgggg

SEQ ID NO: 5535 - DNA, 50 bp, Homo sapiens
tcaccaggaaaacatgcttgtgaattgtgcagtaaaaggtggtaatgact

SEQ ID NO: 5536 - DNA, 50 bp, Homo sapiens
ccttttctctcccatgaccctttaacagcatctgcttcattcccctcacc

SEQ ID NO: 5537 - DNA, 50 bp, Homo sapiens; identical to SEQ ID NO: 1754

SEQ ID NO: 5538 - DNA, 50 bp, Homo sapiens
tgagtgaacaaagctgtgaaacattctgcgtttatgcaacttccttgcct

SEQ ID NO: 5539 - DNA, 50 bp, Homo sapiens
caagaagacaagcatctgtggtgcggaggcaagcaggctaactaggagtt

SEQ ID NO: 5540 - DNA, 50 bp, Homo sapiens
ttggcccagtgtgattgattgctttatctttggtacttttacttgaatgg

SEQ ID NO: 5541 - DNA, 50 bp, Homo sapiens
catccagcactaattttcatgcatttatgaaaggatgcctgaggaccctt

SEQ ID NO: 5542 - DNA, 50 bp, Homo sapiens
agcctgaggcaaataaaattccagtaatttcgaagaatgggtgttggcaa

SEQ ID NO: 5543 - DNA, 50 bp, Homo sapiens
aggaccttgacaagccgtttgagatggaatgtaggccctgatgttatgct

SEQ ID NO: 5544 - DNA, 50 bp, Homo sapiens; identical to SEQ ID NO: 5543

SEQ ID NO: 5545 - DNA, 50 bp, Homo sapiens
agtggagtgtttacaccttgctgtaacatttgaactttcacaagagatgt

SEQ ID NO: 5546 - DNA, 50 bp, Homo sapiens
atatcatattatttgatgccattaggcggcctggatcaccaattctaagt

SEQ ID NO: 5547 - DNA, 50 bp, Homo sapiens
gccaccagacagaaggaccagagtttctgattataaacaatgatgctggg

SEQ ID NO: 5548 - DNA, 50 bp, Homo sapiens
tgttggtgagcaatgtgcagaggcagagccgctgaagtatggttcctgag

SEQ ID NO: 5549 - DNA, 50 bp, Homo sapiens
ggctgctgttgactgaaattcctatcctcaaattactctagactgaagct

SEQ ID NO: 5550 - DNA, 50 bp, Homo sapiens
ctttttagtaggcaaaggttcttcttcctcctcttttggtgcagggacgc

SEQ ID NO: 5551 - DNA, 50 bp, Homo sapiens
gcgtgtatgtgggatgccataggtgtgactgtagagtcattcttccttcc

SEQ ID NO: 5552 - DNA, 50 bp, Homo sapiens
tgtaagttgactttcaaaagtctctggaaacactggactttagctggtcc

SEQ ID NO: 5553 - DNA, 50 bp, Homo sapiens
gaagcgtggcagagaactatggatcaggcagcccctctcatctttaccat

SEQ ID NO: 5554 - DNA, 50 bp, Homo sapiens
ttggtccaaactctggagccttgtgggagaacatagggcataacgtgttt

SEQ ID NO: 5555 - DNA, 50 bp, Homo sapiens
cccttcttagtaaagagacatcttctacagtaaccacagagaagaagtgg

SEQ ID NO: 5556 - DNA, 50 bp, Homo sapiens
tggacataacctgggtcagaagagaaacttttgaagctacacgaacaagc

SEQ ID NO: 5557 - DNA, 50 bp, Homo sapiens
cggctcaaataaacctttaccggatttttggggttatgcccacacccttg

SEQ ID NO: 5558 - DNA, 50 bp, Homo sapiens
ggaccactagtactccagaaccataatataactagacatgcctggaatgc

SEQ ID NO: 5559 - DNA, 50 bp, Homo sapiens
aacaagccatgtttgccctagtccaggattgcctcacttgagacttgcta

SEQ ID NO: 5560 - DNA, 50 bp, Homo sapiens; identical to SEQ ID NO: 4387

SEQ ID NO: 5561 - DNA, 50 bp, Homo sapiens
gagaaacttccgtgcatgaaggtttcctccttgactcggcagcagcggcc

SEQ ID NO: 5562 - DNA, 50 bp, Homo sapiens
ccaagtaggttttaactctggtatggtctcgtgttttcatttgttgtgca

SEQ ID NO: 5563 - DNA, 50 bp, Homo sapiens
gttcccacggagctgacttctccggggtgcctgtgccctacattaaaccc

SEQ ID NO: 5564 - DNA, 50 bp, Homo sapiens
ccgtaactccgacaaacgcagaacttcttgaggctttcttcttctaagga

SEQ ID NO: 5565 - DNA, 50 bp, Homo sapiens
tctggaccctgcttgggttcacagcattggtggaggtaagtagtattctc

SEQ ID NO: 5566 - DNA, 50 bp, Homo sapiens
gaagaggaagctcatccgaagtcttccgacagagtgagccgtcatgcccg

SEQ ID NO: 5567 - DNA, 50 bp, Homo sapiens
agtgtgtattcttgatgtttattggctcatgtggacagaaatgtacaggg

SEQ ID NO: 5568 - DNA, 50 bp, Homo sapiens
agatgaggctgctctgaagattcagtaattaggatggacagtcagctact

SEQ ID NO: 5569 - DNA, 50 bp, Homo sapiens
tgggctttggggttcagtttgttacctttggagacttatttaatgaaacc

SEQ ID NO: 5570 - DNA, 50 bp, Homo sapiens
cagtggttcctgagagaatcttagttcaaaggactgcccccgccaacccc

SEQ ID NO: 5571 - DNA, 50 bp, Homo sapiens
accgccaaagccaatcatccactttcagtacttacctaaccaatctccca

SEQ ID NO: 5572 - DNA, 50 bp, Homo sapiens
caggatgttattgacagggtggcctttgtgattcctccggtggtggcagc

SEQ ID NO: 5573 - DNA, 50 bp, Homo sapiens
gccatttcatttgctgtgtggttagacttccaggaggctgtttagctcta

SEQ ID NO: 5574 - DNA, 50 bp, Homo sapiens
cctttgtgaaaagtcacctgtgactgtcaggggtatgctatgggcctttt

SEQ ID NO: 5575 - DNA, 50 bp, Homo sapiens
gatccactttggggttcggcggcagattattccgctggtagagccggatg

SEQ ID NO: 5576 - DNA, 50 bp, Homo sapiens
aataagggactcattcattatgcagcaaatgttgtttgttattggcttgc

SEQ ID NO: 5577 - DNA, 50 bp, Homo sapiens
cttcatggtctccagccaggactccatcagcgccacggcttcatccgaac

SEQ ID NO: 5578 - DNA, 50 bp, Homo sapiens
ttgatgctcatcatctgctcgaggtgattgatgccaggttgacgcaccat

SEQ ID NO: 5579 - DNA, 50 bp, Homo sapiens
tcctttggataaggtccaaaacctgtaacacatgaccctcagagcccttt

SEQ ID NO: 5580 - DNA, 50 bp, Homo sapiens
cccggcgacttcaccacccgctatctgggcaccaaagactatatctagat

SEQ ID NO: 5581 - DNA, 50 bp, Homo sapiens
cgcaatagtcctcgacaagtcgccaaccctcccacttcggtcgatcagct

SEQ ID NO: 5582 - DNA, 50 bp, Homo sapiens
cgtcgggtacctcgccgataaaatcgctgatggcctggtcgatcctgaag

SEQ ID NO: 5583 - DNA, 50 bp, Homo sapiens
atcttatccctctgttactcaatgtgagtgcatactttacattgcctact

SEQ ID NO: 5584 - DNA, 50 bp, Homo sapiens
ggtccttgaagatgacgcggatgatcgaggtctctgcgccgtaggcgatg

SEQ ID NO: 5585 - DNA, 50 bp, Homo sapiens
atgatgaagctgctgtccaacgccttcgtctgccagtttctgctggtgtg

SEQ ID NO: 5586 - DNA, 50 bp, Homo sapiens
tccttgccagagccttcgggttctacgatttgatcgacgacgctggtgtc

SEQ ID NO: 5587 - DNA, 50 bp, Homo sapiens
tcgaacatgggcagctccgtttcaagatggctcaagactagcggattggg

SEQ ID NO: 5588 - DNA, 50 bp, Homo sapiens
agtgatagagaccaaagactgctttttaattttgtgggggagggggtgga

SEQ ID NO: 5589 - DNA, 50 bp, Homo sapiens
cgggtcactcatgttggctactaacccttttcgtgcgccgggcattctag

SEQ ID NO: 5590 - DNA, 50 bp, Homo sapiens
cttgtccttgatcgcttccttctctgcaagggagagcttctggaccttca

SEQ ID NO: 5591 - DNA, 50 bp, Homo sapiens
cttgtttgacatcagcgccatctcgacagcgtattccgctatgactgttt

SEQ ID NO: 5592 - DNA, 50 bp, Homo sapiens
cacgaagccttcgatcagttgcagcacgcggccagagcggtcgatagaac

SEQ ID NO: 5593 - DNA, 50 bp, Homo sapiens
cattttgccatctgcgagcatctgggtattgacatgatccccagtggagc

SEQ ID NO: 5594 - DNA, 50 bp, Homo sapiens
caccaagctggtcaacatccaggcgaatggctattacgtggatgagatca

SEQ ID NO: 5595 - DNA, 50 bp, Homo sapiens
ttgctgatacggcctttgatcatgttttcaacgatgttttccggcttgcc

SEQ ID NO: 5596 - DNA, 51 bp, Homo sapiens
cctcgacaaactaaatgttgatttgaattggcctgttatcatcttgatcac

SEQ ID NO: 5597 - DNA, 50 bp, Homo sapiens
gtttcagatcgggccgctcccgccgggtacctatagcggaatcgaatttc

SEQ ID NO: 5598 - DNA, 50 bp, Homo sapiens
gaaaacagaaatgatgctcggcacattctcgtccagcacctcggcaacgg

SEQ ID NO: 5599 - DNA, 50 bp, Homo sapiens
aactgtattcgatcaccgtggcgctgatggtgtcagcagtcgccttgttc

SEQ ID NO: 5600 - DNA, 51 bp, Homo sapiens
agttgacatataacccactttacatacattccaaaattgcgagtagtgagt

SEQ ID NO: 5601 - DNA, 50 bp, Homo sapiens
atatcgtaccgagaaactagtgcggatatctgaccaggtatggcggttgg

SEQ ID NO: 5602 - DNA, 50 bp, Homo sapiens
gtggatgacctgatccaggtcggcctgatcggcctgactgatgagctgtc

SEQ ID NO: 5603 - DNA, 50 bp, Homo sapiens
atgatgaccagatgctctggcaccgtgtcgagttcgaggatgccgacatt

SEQ ID NO: 5604 - DNA, 50 bp, Homo sapiens
gatctgggacgcatggccgaagctgaaaagctggctgtagaagacctcga

SEQ ID NO: 5605 - DNA, 50 bp, Homo sapiens
aacatggcaatatttattggtcctaatactgtcactggcaaggttggtgt

SEQ ID NO: 5606 - DNA, 50 bp, Homo sapiens
gaggcagaggtgtagcgagtccaggctctcttcgaacgttgcacccgacg

SEQ ID NO: 5607 - DNA, 50 bp, Homo sapiens
gtcccacacgttcggccctgactctgctgtgttcgacgaggacaatctcg

SEQ ID NO: 5608 - DNA, 50 bp, Homo sapiens
catgacgttgtgctcgacaccccaacagatcacgtaatcagcctggtgga

SEQ ID NO: 5609 - DNA, 51 bp, Homo sapiens
taggctatagagatgtgagggattattattagtcacacctctagtcatgcc

SEQ ID NO: 5610 - DNA, 50 bp, Homo sapiens
ggctgccggatgtgtaggtcttcccatgttgtgaagtaacggtgctccac

SEQ ID NO: 5611 - DNA, 50 bp, Homo sapiens
tgccctgtatagtgttgtaaaaattagaatgtttcacccaaaccatctgg

SEQ ID NO: 5612 - DNA, 50 bp, Homo sapiens
gtctttcgaatcgctctttagctcgtgcgggctgttgtcccacttgttgg

SEQ ID NO: 5613 - DNA, 50 bp, Homo sapiens
ctatgcgctgcgctacaagctggacctgtattcggacttcagctactacc

SEQ ID NO: 5614 - DNA, 50 bp, Homo sapiens
ttcgaagcgacgctgcgtgcgctgctcgtccaattgcagcatggataagg

SEQ ID NO: 5615 - DNA, 50 bp, Homo sapiens
ccttccgctgtcccttcagtagctgtttctgttccctgacgcccacttct

SEQ ID NO: 5616 - DNA, 50 bp, Homo sapiens
caatgcagcggctgatgcagatcacccacgagatgcaggacgaaggcgag

SEQ ID NO: 5617 - DNA, 50 bp, Homo sapiens
tcattcagtctgagtaggaggaaagaggacaggttgttggagagttggtt

SEQ ID NO: 5618 - DNA, 50 bp, Homo sapiens
taattgccgctgaagcacgaatcctcgaaatgcgtcaccttcggattgac

SEQ ID NO: 5619 - DNA, 50 bp, Homo sapiens
aaatgtggtgacaaagtaccagcaagaactggactgtgtttctggagcct

SEQ ID NO: 5620 - DNA, 50 bp, Homo sapiens
gttcatcgtctcgcgtcgcaagaagtaagggctaggccatgactcgttcg

SEQ ID NO: 5621 - DNA, 50 bp, Homo sapiens
ctcttggcagccctgctctcgtgggtcagcatcgtcgcgtgctccggtgg

SEQ ID NO: 5622 - DNA, 50 bp, Homo sapiens
gtgctcgctgagctggtccagaaatccgtcgactgaggcgatggcggctg

SEQ ID NO: 5623 - DNA, 50 bp, Homo sapiens
catgaacaagggccggatcatcctgatgcccaacacactggacttcggtg

SEQ ID NO: 5624 - DNA, 50 bp, Homo sapiens
cacccgttgtaggcgacgagcgtgaacgaaaacgtgtcggacggcttgta

SEQ ID NO: 5625 - DNA, 50 bp, Homo sapiens
catatgcggctgtgccatagccggatgttcttcgtgcgtgcctacccccg

SEQ ID NO: 5626 - DNA, 50 bp, Homo sapiens
ttctttccgtcgcgcatcggaatgcgaaactcgtacttcgtgtagaactc

SEQ ID NO: 5627 - DNA, 50 bp, Homo sapiens
gccaggggctttatcacttccatggccgcagcgatgaccaggtcaagctg

SEQ ID NO: 5628 - DNA, 50 bp, Homo sapiens
cgccgaccaagcttaccgacttctcgccgatctactgcgacgaagaaggc

SEQ ID NO: 5629 - DNA, 50 bp, Homo sapiens
ggtagtgacgtgctgaatgacggtgccgtccatcatcgggtcggagtaag

SEQ ID NO: 5630 - DNA, 50 bp, Homo sapiens
ttcaggactcgtttcacgtaggcaacgctgtctaaagttcccaagggatt

SEQ ID NO: 5631 - DNA, 50 bp, Homo sapiens
ctctttacccggaaacaggttggggagatgacacgcagaaaatcatacgc

SEQ ID NO: 5632 - DNA, 50 bp, Homo sapiens
ctttggatatatcgagaaaggccagggcctgaacaaggaaagcttccagg

SEQ ID NO: 5633 - DNA, 50 bp, Homo sapiens
aaggctggtcaagaatcttgagacggaattgcacagtctcggcgtgatcc

SEQ ID NO: 5634 - DNA, 50 bp, Homo sapiens
gatcgattcgggggtgacatcggcgctgagcaccatcaccggaacataag

SEQ ID NO: 5635 - DNA, 50 bp, Homo sapiens
ctgagatcaccctgaacaccgacaaggacgagatcgcagtctgcaacctg

SEQ ID NO: 5636 - DNA, 50 bp, Homo sapiens
ctgaaggctttggcgacaaccaggtctatccgtttgaaattggcgagaac

SEQ ID NO: 5637 - DNA, 50 bp, Homo sapiens
tcttgtgccagcacgtcttgctgatagccgatgaatcgcgtccctttgtc

SEQ ID NO: 5638 - DNA, 50 bp, Homo sapiens
gaactcctcaaggaaatagtccaccgcctgctgcttggacgctgccagtt

SEQ ID NO: 5639 - DNA, 50 bp, Homo sapiens
gtgacctcggggtcccccttggtgagggtgccggtcttgtcgaagacgac

SEQ ID NO: 5640 - DNA, 50 bp, Homo sapiens
gtgttcgggcttcatgtcgccaacaccatcggcactggcatcatcgatcc

SEQ ID NO: 5641 - DNA, 50 bp, Homo sapiens
aggttgatttccacttcctcgggaggtttcgccacctcttcgcctttgag

SEQ ID NO: 5642 - DNA, 50 bp, Homo sapiens
gttagcttccacgctttatctcctgctctgagtgtgtacccgcgctgctc

SEQ ID NO: 5643 - DNA, 50 bp, Homo sapiens
ttaaagtggtaagggaggtttctactcctggggaaacattaaagtacctt

SEQ ID NO: 5644 - DNA, 50 bp, Homo sapiens
ctttctccgacttcgagatctgcccgtggtcgagatcgtggtagatgatg

SEQ ID NO: 5645 - DNA, 50 bp, Homo sapiens
aactggatagagcacgagccttctaagcttggagttgcaggttcgaatcc

SEQ ID NO: 5646 - DNA, 50 bp, Homo sapiens
gaagatcggcgcaacgaagaccgcttccacttcatcaactggaccaagaa

SEQ ID NO: 5647 - DNA, 50 bp, Homo sapiens
tgcttctgtgacagattagcttacatcttaccacctcaccgagaagagct

SEQ ID NO: 5648 - DNA, 50 bp, Homo sapiens
agctcaagagcttccgcgacgtacccagcaaagtaacgctcgacgaatgc

SEQ ID NO: 5649 - DNA, 50 bp, Homo sapiens
atcgaagacgtgatgctgaacctttgggcgaaggccgagaaggaaggcaa

SEQ ID NO: 5650 - DNA, 50 bp, Homo sapiens
cgataccctcactagacctcggatcgaaataaatcagagcgatcacatcg

SEQ ID NO: 5651 - DNA, 50 bp, Homo sapiens
ggggatacacaccccacaagccttcctgcggcttcatcacggttaccacc

SEQ ID NO: 5652 - DNA, 50 bp, Homo sapiens
gatcttggtgagaagctcggtcatgtagaagacctcgccctgggacacta

SEQ ID NO: 5653 - DNA, 50 bp, Homo sapiens
attttatcgccagctacgtcggcattggtcaggacgacctgaaggggaat

SEQ ID NO: 5654 - DNA, 50 bp, Homo sapiens
tgatgcggagagcgaggtagatcccggcggagttttcgtcgatgggaaag

SEQ ID NO: 5655 - DNA, 50 bp, Homo sapiens
gtacacttcctggatctgatccacgaggtaacgagcgagagtggtgatac

SEQ ID NO: 5656 - DNA, 50 bp, Homo sapiens
gtgacttcatgctcggggttgagcttggcgtccaccaccttttcccactc

SEQ ID NO: 5657 - DNA, 50 bp, Homo sapiens
ccggtgtccttgatcagcttcagcagtggcttgacgtagatgcgggtcgg

SEQ ID NO: 5658 - DNA, 50 bp, Homo sapiens
catcagtgtttctcctgctgggactgttgcatgtggtgcatcacggtttg

SEQ ID NO: 5659 - DNA, 50 bp, Homo sapiens
gcgaggcgaaacatagcttccattgtgtcttttctccttatgcgtcttgc

SEQ ID NO: 5660 - DNA, 50 bp, Homo sapiens
aatgagacccgccgtccctggagatgaagatgtcgtccgactccgtccac

SEQ ID NO: 5661 - DNA, 50 bp, Homo sapiens
cggatgttgtcgttccagaacgaaggatcggcctcttgggcctggatttc

SEQ ID NO: 5662 - DNA, 50 bp, Homo sapiens
ggcaccgacttgggcctgagagaggcgcaggtcatcaatatagaatcggg

SEQ ID NO: 5663 - DNA, 50 bp, Homo sapiens
ccatgctgaacttggccaggtccttgacggcggtgttttccgacagcacc

SEQ ID NO: 5664 - DNA, 50 bp, Homo sapiens
cgcgatgatctcgtccttcggcatggcgatgcgctattccttcgacatgg

SEQ ID NO: 5665 - DNA, 50 bp, Homo sapiens
gcccattgaccgtatcgcgtcatcttgctggcatttctaagaaaataccg

SEQ ID NO: 5666 - DNA, 50 bp, Homo sapiens
tgaaacagggaaaagccaggaagatctccggttccacgtccaatttgtac

SEQ ID NO: 5667 - DNA, 50 bp, Homo sapiens
caagaatgacggaaaaatccgtgagcacaaggcaaaggcttgccgtgtgg

SEQ ID NO: 5668 - DNA, 50 bp, Homo sapiens
gacttgatcacaacccgatccgtaacgacgtattggagccactcgaacaa

SEQ ID NO: 5669 - DNA, 50 bp, Homo sapiens
cttctcgccgtaacttttccgccgagcacgctacgcacgtaggtgttgtg

SEQ ID NO: 5670 - DNA, 50 bp, Homo sapiens
tcgactacgacttcaacttccccaaacggtgggagaagcgagcttgaggc

SEQ ID NO: 5671 - DNA, 50 bp, Homo sapiens
aagttgatcagatcacgggccacgcctgcaaccagaggcttgtcatcgtc

SEQ ID NO: 5672 - DNA, 50 bp, Homo sapiens
tgatctgattgtgaggagagtggagaaggtggtatagaagctgaaagggt

SEQ ID NO: 5673 - DNA, 50 bp, Homo sapiens
cttcatgctcgagaagaaaatgctccgtgcctccgacgacgccaccatcg

SEQ ID NO: 5674 - DNA, 50 bp, Homo sapiens
cagatggtcacgagacgcttgtccgtgatgtcttccgtcagcgtgcagag

SEQ ID NO: 5675 - DNA, 50 bp, Homo sapiens
tgatggatttggaaagtgttattctgtttgacttctccctgctctgctca

SEQ ID NO: 5676 - DNA, 50 bp, Homo sapiens
ttgaacgggtatagccaccaaggcattggctgcaaagtcgggcaaaactt

SEQ ID NO: 5677 - DNA, 50 bp, Homo sapiens
actgtgtattgatgagtatctgatgcctataacatctgtaggaggctaca

SEQ ID NO: 5678 - DNA, 50 bp, Homo sapiens
gtacgaaggtggcgatgatgcgttcgatcacctcggggatttcctcggcg

SEQ ID NO: 5679 - DNA, 50 bp, Homo sapiens
cgaccttcggcgtttccgcttcggaacccgtgaaggcgttcttcactttg

SEQ ID NO: 5680 - DNA, 50 bp, Homo sapiens
attcgctggcaacataattaccagactcacatcgaacgaagctcggttcc

SEQ ID NO: 5681 - DNA, 50 bp, Homo sapiens
tgttcgttgccatccttgtcgaggaacatctcgctttccagttccgcctg

SEQ ID NO: 5682 - DNA, 50 bp, Homo sapiens
tttgggggatccttttgtaatgacttacactggaaatgcgaacatttgca

SEQ ID NO: 5683 - DNA, 50 bp, Homo sapiens
ggacaaggggcacccggattatatttcccaccaatcctaatcctaaaccc

SEQ ID NO: 5684 - DNA, 50 bp, Homo sapiens
tggagcttattttggagaactgtcaccattttatcccagttggcaatttt

SEQ ID NO: 5685 - DNA, 50 bp, Homo sapiens
attatgggtaaggcttgggcttgttcccacatgttaaccaaatggcctca

SEQ ID NO: 5686 - DNA, 50 bp, Homo sapiens
gggagggccaaagaaatctttttcccgtttcaaattatgttccccaaaaa

SEQ ID NO: 5687 - DNA, 50 bp, Homo sapiens
ttaccccaatgcttttgccccggtggcccagtttgtaaattggtttgatt

SEQ ID NO: 5688 - DNA, 50 bp, Homo sapiens
ccccccttggcaggttaattggtgtttaaggaaccctccagggtgggggg

SEQ ID NO: 5689 - DNA, 51 bp, Homo sapiens
ccccccagttttaatgttagggggaagggatttaaccccttatttaaaaaa

SEQ ID NO: 5690 - DNA, 50 bp, Homo sapiens
ctatcacccttgatatgaaattccagaattttctgtgataccacatggcc

SEQ ID NO: 5691 - DNA, 50 bp, Homo sapiens
actccgggccttaatggatttggcctgtcctcaagaatggtaattatgaa

SEQ ID NO: 5692 - DNA, 50 bp, Homo sapiens
acgtggtttcagtccttagcaccgtggtattgacatgacatcagttgcaa

SEQ ID NO: 5693 - DNA, 50 bp, Homo sapiens
cacaacttgctgttcacgtctttggggtgttttccattcctaatagatgg

SEQ ID NO: 5694 - DNA, 50 bp, Homo sapiens
aaacccgtcctccattataattacctttcaaagggcaagtcaaaagttgt

SEQ ID NO: 5695 - DNA, 50 bp, Homo sapiens
aaacagcacaacatgagtgtttcctaccacatcaattttaatgaagacac

SEQ ID NO: 5696 - DNA, 50 bp, Homo sapiens
cggaatcgggtttccattggaccccaaaaatttccctttgggcttcatga

SEQ ID NO: 5697 - DNA, 50 bp, Homo sapiens
tgaggatagaagcagccttttatatttttgtgtggtaaagcaaattggca

SEQ ID NO: 5698 - DNA, 50 bp, Homo sapiens
ggggcaaatttcaagggacctccccaaagggggtgttttccctggatggg

SEQ ID NO: 5699 - DNA, 51 bp, Homo sapiens
aaacaggaagggggtttgggccctttgatcaactggaacctttggatcaag

SEQ ID NO: 5700 - DNA, 50 bp, Homo sapiens
actctttgtctttttaagacccctaatagccctttgtaacttgatggctt

SEQ ID NO: 5701 - DNA, 50 bp, Homo sapiens
ccggctgcctccatcccagaagagtgcgcagagaattaaatctagatatt

SEQ ID NO: 5702 - DNA, 50 bp, Homo sapiens
gggatgtaatacatatttttccaaataaaatgcctcatgggctttggggc

SEQ ID NO: 5703 - DNA, 50 bp, Homo sapiens; identical to SEQ ID NO: 4309

SEQ ID NO: 5704 - DNA, 50 bp, Homo sapiens
agttagtatacagccagaacagccaagcctcaattcttgtaccttgtgtc

SEQ ID NO: 5705 - DNA, 50 bp, Homo sapiens
ccctgatcctctgtagggaacttccttttctctaatcctagatcttttca

SEQ ID NO: 5706 - DNA, 50 bp, Homo sapiens
gaggcatcagaggttcaggagagttacaggcagcaggtgcggtataatat

SEQ ID NO: 5707 - DNA, 50 bp, Homo sapiens
tttgtttctttgggcctgatttgtatctctggaaggcattaattcttgaa

SEQ ID NO: 5708 - DNA, 50 bp, Homo sapiens
gctttgcctctcggaggagtcaaaggggcagtaactgtatggggtgagag

SEQ ID NO: 5709 - DNA, 50 bp, Homo sapiens
gctcccgaatattgtaatttgttgccccctatgtacccaaccccctgaaa

SEQ ID NO: 5710 - DNA, 50 bp, Homo sapiens
aggaagtatgagagttctgaaacccttgatagaaactggaagcctgccat

SEQ ID NO: 5711 - DNA, 50 bp, Homo sapiens
gacatagggttgcagtagtgagtgggcatctgttctcagaaggcagtgcc

SEQ ID NO: 5712 - DNA, 50 bp, Homo sapiens
ttctggccttgttcacctagaaacgctatttcctgtgttatggttctggc

SEQ ID NO: 5713 - DNA, 50 bp, Homo sapiens
gctctgggaaagagacagggaagtctggaatggaaaagaacacgatgaga

SEQ ID NO: 5714 - DNA, 50 bp, Homo sapiens
gggttacatttgagtctctgtacctgcttggaagaaataaaaatacgtgt

SEQ ID NO: 5715 - DNA, 50 bp, Homo sapiens
ctgggaatatgaagcgaacgccacacactagaacgcgccctgggagctgg

SEQ ID NO: 5716 - DNA, 50 bp, Homo sapiens
gctgcttttgcccatccaggtttccacatcctaatctttgcttttcttgt

SEQ ID NO: 5717 - DNA, 50 bp, Homo sapiens
tgtaaatgtggtttgactatttctgtatgtccccatctattgatgagggt

SEQ ID NO: 5718 - DNA, 51 bp, Homo sapiens; identical to SEQ ID NO: 5427

SEQ ID NO: 5719 - DNA, 50 bp, Homo sapiens
acataaactgtccctttaggaagaagcccaatgcccgattttgcccttta

SEQ ID NO: 5720 - DNA, 50 bp, Homo sapiens
ggacaagtggcatcggtactatatttcccaccaatcctaatcctaatccc

SEQ ID NO: 5721 - DNA, 50 bp, Homo sapiens
tatgtccctttttctcctcccttccccattccctggcatcatattgggac

SEQ ID NO: 5722 - DNA, 50 bp, Homo sapiens; identical to SEQ ID NO: 4876

SEQ ID NO: 5723 - DNA, 50 bp, Homo sapiens
tgtgggcttggtataaaccctactttgtgatttgctaaagcacaggatgt

SEQ ID NO: 5724 - DNA, 50 bp, Homo sapiens
ccgcctgaaacgggcattttgtaaatggggtttgactatttttgtatgtc

SEQ ID NO: 5725 - DNA, 50 bp, Homo sapiens
actggcaaatgaagcatactggcttgcagggaccttctgattcaagtaca

SEQ ID NO: 5726 - DNA, 50 bp, Homo sapiens
gaattcgatttgagatctgagggcagacccgaaccaggaaagcaactcag

SEQ ID NO: 5727 - DNA, 50 bp, Homo sapiens
aatgcaccaggctgccacctgcaccagtggttgctacatgggataagaaa

SEQ ID NO: 5728 - DNA, 50 bp, Homo sapiens
tatgataggattctccacagtggcttccgactcaggctccaatggaccaa

SEQ ID NO: 5729 - DNA, 50 bp, Homo sapiens
tgctgtatgggcaggttgtcttattatgtgatcaacagatgtccaggaac

SEQ ID NO: 5730 - DNA, 50 bp, Homo sapiens
acctccaagaacatctgcctttgttgaacgtgtttattacctgtccactc

SEQ ID NO: 5731 - DNA, 50 bp, Homo sapiens
ccttttgccccttagcccttggataatccggctgggaatgggggtgaggg

SEQ ID NO: 5732 - DNA, 50 bp, Homo sapiens
cccaaataagctctgtacttcggttacctatgtacctgttaccactttca

SEQ ID NO: 5733 - DNA, 50 bp, Homo sapiens
gccacatgtcctattctcacacaggtgctttaatttcagcccagtctcta

SEQ ID NO: 5734 - DNA, 50 bp, Homo sapiens
cttgaaggggctttgttgggtttttggggttttgggtgggactcccaaag

SEQ ID NO: 5735 - DNA, 52 bp, Homo sapiens
ggggttttaaaaattttcccgatttcaaaattaattttccgttgccccccgg

SEQ ID NO: 5736 - DNA, 50 bp, Homo sapiens
ccccctggggtttttgggaatgaggtaaggctttgaatttggtttgatat

SEQ ID NO: 5737 - DNA, 50 bp, Homo sapiens
acatgcttagagctggaggcttgaaaccataatcccaattaagtgctgtc

SEQ ID NO: 5738 - DNA, 50 bp, Homo sapiens
tgtttgtccaggaaaaggaagagggggaaattaaaacctttccggttagt

SEQ ID NO: 5739 - DNA, 50 bp, Homo sapiens
gcactgctccgtctagctgtatgacctttgttatgtttcttttcttccgt

SEQ ID NO: 5740 - DNA, 50 bp, Homo sapiens
cttcaatctgggctgggcactccacgcacataatcgtcactctcggagga

SEQ ID NO: 5741 - DNA, 50 bp, Homo sapiens
gcgggaagtgaaagcggaggctgggacaaggggaacttactgctcaaaaa

SEQ ID NO: 5742 - DNA, 50 bp, Homo sapiens
agtggtgtggtggcaataggaaaagaaaagatcaggatgagaaattgctt

SEQ ID NO: 5743 - DNA, 50 bp, Homo sapiens
ccaagggccttttggggttgtttcctataacttcagtattgtaaattagt

SEQ ID NO: 5744 - DNA, 50 bp, Homo sapiens
cataaaggggcattgccctagccggtccggcctttttccagtccatcctg

SEQ ID NO: 5745 - DNA, 51 bp, Homo sapiens
aggtttaagaaatttcccctaaatcttgtttggttggttgggatgaaaagt

SEQ ID NO: 5746 - DNA, 50 bp, Homo sapiens
aattgatcccattcttgctgaagtagacagtgccctcaagtggaattaaa

SEQ ID NO: 5747 - DNA, 50 bp, Homo sapiens
ctccaatgctgttatcccggctgggtcctcacactcccccaacaatccca

SEQ ID NO: 5748 - DNA, 50 bp, Homo sapiens
agaatgcgctatttccctcaaagccctggctgtaataaagaagccgattt

SEQ ID NO: 5749 - DNA, 50 bp, Homo sapiens
ctgaggtcagtgtggtttggtggaaggattatgatatttacaagctgagt

SEQ ID NO: 5750 - DNA, 50 bp, Homo sapiens
ggtcaatgttttgaaatttgtggagcaaaccccagttttatgcccttggt

SEQ ID NO: 5751 - DNA, 50 bp, Homo sapiens
agttggaaaatttagaaatgtccactgtaggacgtggaatatggcgtcga

SEQ ID NO: 5752 - DNA, 50 bp, Homo sapiens
ttcacgtcctaaagtgtggtagacgcgcccgcgaatttagtagtagtagg

SEQ ID NO: 5753 - DNA, 50 bp, Homo sapiens
ggacaagtggcatccgtattatatttcccaccattcctattcttaatccc

SEQ ID NO: 5754 - DNA, 50 bp, Homo sapiens
ggtctgcctcagtcttctactcatcagcaccacactgtcaaaatgttgga

SEQ ID NO: 5755 - DNA, 50 bp, Homo sapiens
agatgaattgaagcaaaaagttttcagtaccagcagcaaggcagaccccc

SEQ ID NO: 5756 - DNA, 50 bp, Homo sapiens
tcacctccacctctgagggagcaacgaatacaaaggtagacccccaaaag

SEQ ID NO: 5757 - DNA, 50 bp, Homo sapiens
ccccagccagcacttcccttttctgcgagggttttctgtttctttgatta

SEQ ID NO: 5758 - DNA, 50 bp, Homo sapiens
agaaaatttgaaccctacgcttctcccatcccacttcttactccatcccg

SEQ ID NO: 5759 - DNA, 50 bp, Homo sapiens
ctgtggcatcattcacaccaccagcagagtcccttccaagaggggtctgg

SEQ ID NO: 5760 - DNA, 50 bp, Homo sapiens
ccgtgttaaaaccaaagtttgggatttttcgggtattcattggaagtcac

SEQ ID NO: 5761 - DNA, 50 bp, Homo sapiens
cgagagcctggaagctttgcacactactgcctggaagatctgattctttg

SEQ ID NO: 5762 - DNA, 50 bp, Homo sapiens
tgttttaaaagtgggtttatttcaaccccttcactcccggttggtgaccg

SEQ ID NO: 5763 - DNA, 50 bp, Homo sapiens
tcttctctcagtcttcagcaagtagcttctttcagaactgcctcctcccg

SEQ ID NO: 5764 - DNA, 50 bp, Homo sapiens
gttttctgcatcccaaatgtcctggggcatgtgtcccttccttgctgacc

SEQ ID NO: 5765 - DNA, 50 bp, Homo sapiens
tgttatgattctctcaatttcataaagctcttctggcagaggagacagat

SEQ ID NO: 5766 - DNA, 50 bp, Homo sapiens
aaatggattacaatttccctgacatttgggcataaaacatctgccatcct

SEQ ID NO: 5767 - DNA, 50 bp, Homo sapiens
tcctccttccagagacctttgctttactgccattttttctgtgggctttt

SEQ ID NO: 5768 - DNA, 50 bp, Homo sapiens
aggcatagcagtagaatctgtcaaaaaggaggcatggaatgaaatgaacc

SEQ ID NO: 5769 - DNA, 50 bp, Homo sapiens
ctgaccctctcgcccctccacctgtgcttctgccctaggataacgctggg

SEQ ID NO: 5770 - DNA, 50 bp, Homo sapiens
gacccaaagaaaagatcaagaccgcatgtagcaaatgtagcaaggaggca

SEQ ID NO: 5771 - DNA, 50 bp, Homo sapiens
ctaatttcccactaaaaggtccagaaaaattgatgccacctgtagtttgg

SEQ ID NO: 5772 - DNA, 50 bp, Homo sapiens
gtaaagttccaagcgagtggaaggtaaatcacgactgtggcaccggagcc

SEQ ID NO: 5773 - DNA, 50 bp, Homo sapiens
gaaactgaatgaccatggaatgctgaaattccaaaagaaaaacgtcgcgc

SEQ ID NO: 5774 - DNA, 50 bp, Homo sapiens
tctctcaggtcgtcttcagagtccattccctttgtcttgatcttttctct

SEQ ID NO: 5775 - DNA, 50 bp, Homo sapiens
ctcccatcattccctcccgaaagccattttgttcagttgctcatccacgc

SEQ ID NO: 5776 - DNA, 50 bp, Homo sapiens
gccctgccccctacccttgccctttaaatttttgggactgaataaagaat

SEQ ID NO: 5777 - DNA, 50 bp, Homo sapiens
tgcaggataacttgctcatgaaaggaaatgccagattaaaccccttgcca

SEQ ID NO: 5778 - DNA, 50 bp, Homo sapiens
gccttcccttcgttcctttccaggcaataatgacatcattagtgatgcaa

SEQ ID NO: 5779 - DNA, 50 bp, Homo sapiens
cgccacggctccaatccctatatgagtgagcagtagaatcacataggaat

SEQ ID NO: 5780 - DNA, 50 bp, Homo sapiens
cctagaatcagactttaagcacaagcagggagggaaagcacttgagcagt

SEQ ID NO: 5781 - DNA, 50 bp, Homo sapiens
gcacatgcaaaaactcagatgtgcaaataactgttccctattaactacaa

SEQ ID NO: 5782 - DNA, 50 bp, Homo sapiens
ggtgctcaaactgtattttctccctccctccctccttctttctttccaga

SEQ ID NO: 5783 - DNA, 50 bp, Homo sapiens
ttcttccacgggatttctaattcattaaataggacctccacaccagacct

SEQ ID NO: 5784 - DNA, 50 bp, Homo sapiens
tatccagcctgacttcttcatgctgtactagccttccaatccttaactaa

SEQ ID NO: 5785 - DNA, 50 bp, Homo sapiens
tggacattgggggtcaaacccttttgtttaaattttccctttcccagggc

SEQ ID NO: 5786 - DNA, 50 bp, Homo sapiens
gctgtgccacggtcaggtggcttccaatctgtactcaattgttactgtac

SEQ ID NO: 5787 - DNA, 50 bp, Homo sapiens
tcagagatgctgatgtcatataagtagtttccctgtctggccttggatgt

SEQ ID NO: 5788 - DNA, 50 bp, Homo sapiens
gtatgactgatgatagctgcgaatgaggaggagggaagggaaggctggag

SEQ ID NO: 5789 - DNA, 50 bp, Homo sapiens
ccattgccccggtgttttggtttaattttcccaggcttattttaaaggcc

SEQ ID NO: 5790 - DNA, 50 bp, Homo sapiens
aggaaattaaacatgagcatgacatgaccccaactctcaagaaatcccca

SEQ ID NO: 5791 - DNA, 50 bp, Homo sapiens
atcaggtcccctacaaaattagctactttggcctttcctacaaaattagc

SEQ ID NO: 5792 - DNA, 50 bp, Homo sapiens
tcattcgtttgctttctctgactgacaggcagtaatgacttcaataagct

SEQ ID NO: 5793 - DNA, 50 bp, Homo sapiens
agggcctgcttcagagtttgtttcctaaataaaacaatggctctccccgt

SEQ ID NO: 5794 - DNA, 50 bp, Homo sapiens
cccccaacttacatggaaaagggatggttgcatttctgtgtcatatgcat

SEQ ID NO: 5795 - DNA, 50 bp, Homo sapiens
gcagagggaagaggaaatgctttgaagccttgctagttatttaattagtt

SEQ ID NO: 5796 - DNA, 50 bp, Homo sapiens
gacatagttgcaaaacacaatacttaatactttttctggaggagggggcc

SEQ ID NO: 5797 - DNA, 50 bp, Homo sapiens
accccttttcttaatttctcaggaaaatggcagctccttcttttgtcgtc

SEQ ID NO: 5798 - DNA, 50 bp, Homo sapiens
cctccggtgtcttcggaagcactgaagggacatctggggaccctcacctg

SEQ ID NO: 5799 - DNA, 50 bp, Homo sapiens
actctttgaccaataaatcactggaatagaggttccagcatattctgaga

SEQ ID NO: 5800 - DNA, 50 bp, Homo sapiens
atgcttacaccctggatgaataaagtctttatttacacctccacctcccc

SEQ ID NO: 5801 - DNA, 50 bp, Homo sapiens
ctcttcacaggtcataagcccctctgagcggcgacagtcctcgcatccag

SEQ ID NO: 5802 - DNA, 50 bp, Homo sapiens
cagctcgacctcagtccccttcagaaataagatggcggctgcgctgacag

SEQ ID NO: 5803 - DNA, 50 bp, Homo sapiens
tttcaacgtgtacctttcctgggaaaccatctcaataaacacattttggt

SEQ ID NO: 5804 - DNA, 50 bp, Homo sapiens
gctggacacatgggttaagaggaggaaaagtaggaaaggaggaggggaaa

SEQ ID NO: 5805 - DNA, 50 bp, Homo sapiens
ggctgggaccagggtttttcaagccaccttttcctgtctcagttcagaga

SEQ ID NO: 5806 - DNA, 50 bp, Homo sapiens
cccactttcacacatgactcacacgactgaaggaaagaaagggcatcctt

SEQ ID NO: 5807 - DNA, 50 bp, Homo sapiens
aagaaattaaggaaggcaagagggtaggtgttggcccatggaagtttccc

SEQ ID NO: 5808 - DNA, 50 bp, Homo sapiens
ctggcaaatattgcggaagatgtactgaaatgtaattgaaatgtagctgc

SEQ ID NO: 5809 - DNA, 50 bp, Homo sapiens
agcataagagatacgaagctgatggtaattaacttgtaccccttgaagtg

SEQ ID NO: 5810 - DNA, 50 bp, Homo sapiens
agtgtcagacaattagatactctttcctgtcttcaggagcccatctggaa

SEQ ID NO: 5811 - DNA, 50 bp, Homo sapiens
gaagtgtaaacatgccaacagggtttatatttaggttccaagagttgcca

SEQ ID NO: 5812 - DNA, 50 bp, Homo sapiens
cttcccaaactccattgtctcattctcactgcttatgttattgctcttat

SEQ ID NO: 5813 - DNA, 50 bp, Homo sapiens
cccacacagcagagaagtatcagaaaacatagaaacatgtgaaaatgcgc

SEQ ID NO: 5814 - DNA, 51 bp, Homo sapiens
aggttcaattcattttcctgagatgtttggtttataagatttgaggatggt

SEQ ID NO: 5815 - DNA, 50 bp, Homo sapiens
atacttagatgtgcttggatcctgggtgggaggcttggttagaagtcacg

SEQ ID NO: 5816 - DNA, 50 bp, Homo sapiens
tgggtcagcgtgttcaattttaaataggaatacactagccttacaacgga

SEQ ID NO: 5817 - DNA, 50 bp, Homo sapiens
tgttcatcttgatgtaatagagaaggaaagagagagcatcccttttcagt

SEQ ID NO: 5818 - DNA, 50 bp, Homo sapiens
accagtaacacaatgacggcaagcacagagaaggaaaaagtcagatcccc

SEQ ID NO: 5819 - DNA, 50 bp, Homo sapiens
acttggagctagagagccacccatcatatggaggagaagtggtcactcta

SEQ ID NO: 5820 - DNA, 50 bp, Homo sapiens
tgcatgtgtgttgtgtacttgtctgttctgtaagattgtcggtgttacac

SEQ ID NO: 5821 - DNA, 50 bp, Homo sapiens
ttcctggcagtaaagaaaagaaagaagatgtgagttatgaagcattgact

SEQ ID NO: 5822 - DNA, 51 bp, Homo sapiens
aaataggaatataatctgtccacatcaaagaatgggaagtcgaagtgtaca

SEQ ID NO: 5823 - DNA, 50 bp, Homo sapiens
gttccaaatgttttccgctaatagtttgtcctaaagcctttgccattcct

SEQ ID NO: 5824 - DNA, 50 bp, Homo sapiens
acagagaaggcttatttacgttgggaattacattaaggaaaagtggtgac

SEQ ID NO: 5825 - DNA, 50 bp, Homo sapiens
ccttcctcctatatcctgccttgaatagggatgtgataccttgagccatg

SEQ ID NO: 5826 - DNA, 50 bp, Homo sapiens
atatttgggtctctgtttaagatttcattgccgtggtagggagagttcca

SEQ ID NO: 5827 - DNA, 50 bp, Homo sapiens
tggatgccatgatgacaccaataagcaacccacagattaggggaaatact

SEQ ID NO: 5828 - DNA, 50 bp, Homo sapiens
ggggctgggagccaccaaaagggcctgctcttcggagaaatgctgaattc

SEQ ID NO: 5829 - DNA, 50 bp, Homo sapiens
aggcatcttgaaagttccataaagacagaagtaagggtcattcagtcatt

SEQ ID NO: 5830 - DNA, 50 bp, Homo sapiens
agctaaagccacggaactcaatgagatttatgcatggaaggaaacaggtt

SEQ ID NO: 5831 - DNA, 50 bp, Homo sapiens
tgttctctctcgaactctggagcacatcagctctctctgcataaactgtt

SEQ ID NO: 5832 - DNA, 50 bp, Homo sapiens
atctggaggatggcagtttgagaattaggactaagcccgtctcccctttg

SEQ ID NO: 5833 - DNA, 50 bp, Homo sapiens
cattagctctctaaacatttggcctaagggattcataggtgaagccttta

SEQ ID NO: 5834 - DNA, 50 bp, Homo sapiens
ggtaggatttatccttttcttcatgtgcaactgtataaactggcaaagca

SEQ ID NO: 5835 - DNA, 50 bp, Homo sapiens
agtcttatgggacagagcagctctccagtctaggatggtagaagattctt

SEQ ID NO: 5836 - DNA, 50 bp, Homo sapiens
gagtctgtacccctttctaataaactgctctggacacaatgaaccctgaa

SEQ ID NO: 5837 - DNA, 50 bp, Homo sapiens
ccatcggcaagccttggtgggttcatattcagtggcattagggattaagg

SEQ ID NO: 5838 - DNA, 50 bp, Homo sapiens
ccatttcttctggatcctctcctagttgtctttgtgtggacgcacaagcg

SEQ ID NO: 5839 - DNA, 50 bp, Homo sapiens
gatcctttgctgacactggtttctctcttattttgccccgccaataaaaa

SEQ ID NO: 5840 - DNA, 51 bp, Homo sapiens
tctgtctgaaacttcttttctctctgagaattaaattttccaatggaccgt

SEQ ID NO: 5841 - DNA, 50 bp, Homo sapiens
gatctgtgttttcctcccaaaagaagatcatctttccagaaaaagaggat

SEQ ID NO: 5842 - DNA, 50 bp, Homo sapiens
ttccatatgtcactgtatctgcctggcattaccccttcttaaaacacaca

SEQ ID NO: 5843 - DNA, 50 bp, Homo sapiens
gctcactaccacttcttcaaatccagctaaaagcatcacggcctcaatga

SEQ ID NO: 5844 - DNA, 50 bp, Homo sapiens
gtctggttgttagctttcccgatcctccacacattggaaacctaagcata

SEQ ID NO: 5845 - DNA, 50 bp, Homo sapiens
gggcaatggagccacagactctctaacttcaagaggtgtttcataggtgt

SEQ ID NO: 5846 - DNA, 50 bp, Homo sapiens
agctgaggtcagacaaaccacaacatatatgcagatttatcagcaataaa

SEQ ID NO: 5847 - DNA, 50 bp, Homo sapiens
cctgccagggttgttcggaagtcgcaggtccgaaaatctcctccgcatac

SEQ ID NO: 5848 - DNA, 50 bp, Homo sapiens
cttctctgaaatggtacgcctatacttgcatttctgagaagccaaacaaa

SEQ ID NO: 5849 - DNA, 50 bp, Homo sapiens
agttttctggctaagtcacctcttaaggagatccctgtaaaattcaccct

SEQ ID NO: 5850 - DNA, 50 bp, Homo sapiens
cagattaaaaaccccatcccggccctcaccgaggtgttacaactctgtcc

SEQ ID NO: 5851 - DNA, 50 bp, Homo sapiens
agcaaattactctgcctggaaataaaattctgtcacttcaagcatctcct

SEQ ID NO: 5852 - DNA, 50 bp, Homo sapiens
tccaggcactgtataggtggcgaggacacaatgataggcaaagtagtaca

SEQ ID NO: 5853 - DNA, 50 bp, Homo sapiens
acagacccaaacctcacagagtgaaaggggactttcctcacagagtgaaa

SEQ ID NO: 5854 - DNA, 51 bp, Homo sapiens
ttgcttcagacttttaacaacaatcctagaagccagaaaacaatgaagaaa

SEQ ID NO: 5855 - DNA, 50 bp, Homo sapiens
ttctgtcagggcttcaaaagagacttccatagttttgggaactggagtca

SEQ ID NO: 5856 - DNA, 50 bp, Homo sapiens
gatatattgaaggtcagaggcagagctaaacaggtgatgccactgggtct

SEQ ID NO: 5857 - DNA, 50 bp, Homo sapiens
aggctcttgttgagtattcctttgattcctgcttctgtctttttaaatca

SEQ ID NO: 5858 - DNA, 50 bp, Homo sapiens
acacaccaaaagaaatagaagagtctttttctgcccttggggaatctgca

SEQ ID NO: 5859 - DNA, 50 bp, Homo sapiens
acacccagcacccacagggaagaaataattccacagagctaagtattcca

SEQ ID NO: 5860 - DNA, 50 bp, Homo sapiens
tgtgcctgtgtgctccagcctcttcctatgtgtgtaacttcaataaaacc

SEQ ID NO: 5861 - DNA, 50 bp, Homo sapiens
accgagtgttaccgcaagaggtgtaaaaatccaggttcatgtttgcacac

SEQ ID NO: 5862 - DNA, 50 bp, Homo sapiens
tcctgattctcaaagtacccccttccctacaactctaacatgctttgtct

SEQ ID NO: 5863 - DNA, 50 bp, Homo sapiens
ccatgatttttccaatggacaagcactattaacatgggactgtatttcct

SEQ ID NO: 5864 - DNA, 50 bp, Homo sapiens
aatagaactgatagcccatgatgattggctggcagggttaaggaagtggg

SEQ ID NO: 5865 - DNA, 50 bp, Homo sapiens
tcccaggagagtcacatttctttttcactaaataaggaggggaagaaaaa

SEQ ID NO: 5866 - DNA, 50 bp, Homo sapiens
gggttacctcactttctaggttcccaagattcccaagttaaggaagcttt

SEQ ID NO: 5867 - DNA, 50 bp, Homo sapiens
aaagcgtccagtccccctaactcaaacacagaaacataacaattttacaa

SEQ ID NO: 5868 - DNA, 50 bp, Homo sapiens
cccagggctcctccacctgaaagaattgtcagggtttcagatcagctaaa

SEQ ID NO: 5869 - DNA, 50 bp, Homo sapiens
tggcctccacccattaaactgtctttgcctaagacaaataattcccagga

SEQ ID NO: 5870 - DNA, 50 bp, Homo sapiens
tgtactcctgatgcctgaaaatcgttaagtgaagacttatcacattaccg

SEQ ID NO: 5871 - DNA, 50 bp, Homo sapiens
atccttcagattgagctgggtgtcagcattcaattccacaaggctacctg

SEQ ID NO: 5872 - DNA, 50 bp, Homo sapiens
tggataagcaatatgttggactagtatgaaaatggcattcccagcagtga

SEQ ID NO: 5873 - DNA, 50 bp, Homo sapiens
tcactagcagaatatagtgggcatgaccagtatcctagtagagctgaccc

SEQ ID NO: 5874 - DNA, 50 bp, Homo sapiens
agtttctttcttacaatgggggtctgaaatccagggtttccacaccaggg

SEQ ID NO: 5875 - DNA, 50 bp, Homo sapiens
ccaaatacttagtgtagttgacttgtcttgggttgcactgtaaggcagag

SEQ ID NO: 5876 - DNA, 50 bp, Homo sapiens
caagagtttccatgcgtccagtgatgaccggaattaatcatgtatggtgt

SEQ ID NO: 5877 - DNA, 51 bp, Homo sapiens
gtttctaacccataagtgcctcatacatacattgctagtctaaagagcttt

SEQ ID NO: 5878 - DNA, 50 bp, Homo sapiens
accggctaattttgtaactggcttgtttgtaaaataaatccttcctgtgt

SEQ ID NO: 5879 - DNA, 50 bp, Homo sapiens
tggtgggactatgtgttattcttgtatacttgcagtgggtagatgtcact

SEQ ID NO: 5880 - DNA, 50 bp, Homo sapiens
acttccctacctcacaggttaggattcaaagtgtgtattcccccattgtg

SEQ ID NO: 5881 - DNA, 50 bp, Homo sapiens
gggtgctttacaggattcttggaaatgtgtagtggatgctggctctaggg

SEQ ID NO: 5882 - DNA, 50 bp, Homo sapiens
acagaagcagggggtcagaaagtttcataaaggaggtgtcttggaacaaa

SEQ ID NO: 5883 - DNA, 50 bp, Homo sapiens
ctattgtgtgggttgccttgtcctactcaacttcaaatattcaccacccc

SEQ ID NO: 5884 - DNA, 50 bp, Homo sapiens
caggtgtgcttactggcaggaaccgagggaataaataaagatcactggaa

SEQ ID NO: 5885 - DNA, 50 bp, Homo sapiens
accagccttatgtgtgtgggtattcaatactctgcacattatatactgta

SEQ ID NO: 5886 - DNA, 50 bp, Homo sapiens
gggcatttgttaccccctcctcaccaccatccccattaaaggcttcgggg

SEQ ID NO: 5887 - DNA, 50 bp, Homo sapiens
ctgtatctacaactcctgacttcagatttttgctttcttcaaaacagcct

SEQ ID NO: 5888 - DNA, 50 bp, Homo sapiens
agcaagacttaaccactaattactattatctgacccaggaaaactccgcc

SEQ ID NO: 5889 - DNA, 50 bp, Homo sapiens
tggatagttgctcaatgtagcagtgatgttcttggaattgccagcagagc

SEQ ID NO: 5890 - DNA, 50 bp, Homo sapiens
ccaacagattcgtgcttaccctgaggtgaagcctcgtttgagaaccaaat

SEQ ID NO: 5891 - DNA, 50 bp, Homo sapiens
caaccttcttgttgaattgatttactactcatcagggtcatgcacaagca

SEQ ID NO: 5892 - DNA, 50 bp, Homo sapiens
acattcaaactgccagaatatgactgtaaaacagcgaagtgttctcttgc

SEQ ID NO: 5893 - DNA, 50 bp, Homo sapiens
tcttcctgggaatgtgatgtgtttttcactggttctaattctgtcttcct

SEQ ID NO: 5894 - DNA, 50 bp, Homo sapiens
acttattaattctcacctcagcctcagggatgtatgtagggaaggagcat

SEQ ID NO: 5895 - DNA, 50 bp, Homo sapiens
acattcctgtcattagtgaataagaagctgaggtgtgactaagaagacaa

SEQ ID NO: 5896 - DNA, 52 bp, Homo sapiens
cctccttgataaaatcaagaacaggttagattaaagcagtaaatcctagact

SEQ ID NO: 5897 - DNA, 50 bp, Homo sapiens
tcctggcctttgtgggtttttaattccctttaccttttccctttttggat

SEQ ID NO: 5898 - DNA, 50 bp, Homo sapiens
actgctgcaactacaattctcagatagtcccatttgtttaaatcacgcat

SEQ ID NO: 5899 - DNA, 50 bp, Homo sapiens
ccttccctcttgcctgtaggttctgtggctataaacaaatcataactttt

SEQ ID NO: 5900 - DNA, 50 bp, Homo sapiens
ttaaatgcttccctggctctccctgggtttcagtttctatccatgccctg

SEQ ID NO: 5901 - DNA, 50 bp, Homo sapiens
ttgttctcctcccaagtctctggttctatttggctttttcagctctgtgc

SEQ ID NO: 5902 - DNA, 50 bp, Homo sapiens
gcatttcagggacacaaatggtccatggcagagaccagtaatgccagata

SEQ ID NO: 5903 - DNA, 50 bp, Homo sapiens
ttttatccccgctttaactttgtttgcttggtacttttcttgtggttaca

SEQ ID NO: 5904 - DNA, 50 bp, Homo sapiens
cacgcacccaactccccactgctcctctccatccagatgttcgtccagag

SEQ ID NO: 5905 - DNA, 50 bp, Homo sapiens
tttgagggcaatttaatggttaagtgtaggaaaatccactcttacagtgt

SEQ ID NO: 5906 - DNA, 50 bp, Homo sapiens
ggccttttgattttccattggggtcccccgctttcccatttttggttttt

SEQ ID NO: 5907 - DNA, 50 bp, Homo sapiens
gacagtttggggaagggattgaaggtctgcgtcaaagagaacagaaaacc

SEQ ID NO: 5908 - DNA, 51 bp, Homo sapiens
aggggccttttaccggtttgttttcccttaaatttttaaaggaattgaatt

SEQ ID NO: 5909 - DNA, 50 bp, Homo sapiens
tcctctttcttgtcactgtgaagcgatgaataaacctgggtgtagatcca

SEQ ID NO: 5910 - DNA, 50 bp, Homo sapiens
cctagaaattattatacagggataaatgaggcactgaaggtgggagaacc

SEQ ID NO: 5911 - DNA, 50 bp, Homo sapiens
acgacaaactgcacagtaaatatcacaaacacggaaataccacagtgtct

SEQ ID NO: 5912 - DNA, 50 bp, Homo sapiens
accatgacttggcaaagagtttcaagagagggcataatcaaaagtaacca

SEQ ID NO: 5913 - DNA, 50 bp, Homo sapiens
gattaatcaagggaagagcttcaagcagagctccttaggtttttcaaaaa

SEQ ID NO: 5914 - DNA, 50 bp, Homo sapiens
gctcaggggacagctattctttttcaaagcgtttaccgactggatcacct

SEQ ID NO: 5915 - DNA, 50 bp, Homo sapiens
tgagagctttccttcctcctacgatccaaccatgtcaaacatttcctaca

SEQ ID NO: 5916 - DNA, 50 bp, Homo sapiens
tgtgccaacgcatgatttctttgagtaaatttctaaacgtcacagaagtt

SEQ ID NO: 5917 - DNA, 50 bp, Homo sapiens
agtcaacatggagcaagtgagctaaggaagtaatggaaactgtttggaga

SEQ ID NO: 5918 - DNA, 50 bp, Homo sapiens
agctcaggtcttccctcatctgttagtttcctggagtctgttctcatact

SEQ ID NO: 5919 - DNA, 50 bp, Homo sapiens
aaacatactcctcttcaccagcactcagacatttgtatccagagaaagct

SEQ ID NO: 5920 - DNA, 50 bp, Homo sapiens
agtctgtcaattgtttaagcctgtgatctttcttttcccagttaagagtt

SEQ ID NO: 5921 - DNA, 50 bp, Homo sapiens
tgtcctctcaaccctacttgtggttttacactgttaattacactatttgc

SEQ ID NO: 5922 - DNA, 50 bp, Homo sapiens
gtgtgtgtatggttgttgggcgtaggacaggtttcggggatgcgcggtac

SEQ ID NO: 5923 - DNA, 50 bp, Homo sapiens
ctgtgcttgactattgaaaacttagaattgggatgccaaagttacttcct

SEQ ID NO: 5924 - DNA, 50 bp, Homo sapiens
ggttgtatcaaaagaactccacatccatattgaataaactcccactagcc

SEQ ID NO: 5925 - DNA, 50 bp, Homo sapiens
ggctgcccagatctcgtgggaagaagaccacaggaggactcggctcaatg

SEQ ID NO: 5926 - DNA, 50 bp, Homo sapiens
tggaaaaatgatagcagccaacttgacagaagaacccagcatacacattc

SEQ ID NO: 5927 - DNA, 50 bp, Homo sapiens
ttggttttggggattgggaagtcttaagccaaattgtccccggtctcccc

SEQ ID NO: 5928 - DNA, 50 bp, Homo sapiens
gccctatatctagtgagcaggttgtggcaatcaggaagggattgatattt

SEQ ID NO: 5929 - DNA, 50 bp, Homo sapiens
tgcacgcaatgcttgaagtgttcccaggtatttagtttcaggtaaatttt

SEQ ID NO: 5930 - DNA, 50 bp, Homo sapiens
ctgtaggtatgagctgccaggatccaggtgtgactcgggtatttctaggg

SEQ ID NO: 5931 - DNA, 50 bp, Homo sapiens
tcccatttggggggtgggctgtttaaattttgactccctgttttaaaccc

SEQ ID NO: 5932 - DNA, 50 bp, Homo sapiens
ccacttgcatctcttctgggggttctttcctttctttcctgttctaaggc

SEQ ID NO: 5933 - DNA, 50 bp, Homo sapiens
tgggtaatcaacactcaaccatcaacaaacactctctattccaggcactg

SEQ ID NO: 5934 - DNA, 50 bp, Homo sapiens
aggagaaataattagagtggcacactagcatgatggtaaacattctgtca

SEQ ID NO: 5935 - DNA, 50 bp, Homo sapiens
aggagttcaagaagcagagatttccaggtccatgcaccaaagctcatgtg

SEQ ID NO: 5936 - DNA, 50 bp, Homo sapiens
cttgtcctctcctgatccagggctccagtgcccatgtccagtgccttggt

SEQ ID NO: 5937 - DNA, 50 bp, Homo sapiens
gcatctccccgctgtcagcctcagccctctcctaccaaaatctctttcga

SEQ ID NO: 5938 - DNA, 50 bp, Homo sapiens
ggcgtttcccattgaccagtttgaccctggtttgaataaagagaagtgcg

SEQ ID NO: 5939 - DNA, 50 bp, Homo sapiens
agcccattgaaaaccttggcaaaatgtcagaccttaagactttccactat

SEQ ID NO: 5940 - DNA, 50 bp, Homo sapiens
tcagagacaacggaagctgaaaaataagagctgagaaaggaagaactttt

SEQ ID NO: 5941 - DNA, 50 bp, Homo sapiens
atatacatacaaatctaagctccaagaagcctaagaaaaccccttagggg

SEQ ID NO: 5942 - DNA, 50 bp, Homo sapiens
gggcaatttacatcgggactcgtttcatctctagaccttcacttacctga

SEQ ID NO: 5943 - DNA, 50 bp, Homo sapiens
agctctggagtgcccctccctccaaataaagtattttaagcgaacactga

SEQ ID NO: 5944 - DNA, 50 bp, Homo sapiens
gccagtctctatgtgtcttaatcccttgtccttcattaaaagcaaaacta

SEQ ID NO: 5945 - DNA, 50 bp, Homo sapiens
ccctcaggcatagaaattgaatctgaaatggctgatgaataagcaaaggc

SEQ ID NO: 5946 - DNA, 50 bp, Homo sapiens
cagccctgcctgagtttttgacacctgcatccctccctgcctcacctcac

SEQ ID NO: 5947 - DNA, 50 bp, Homo sapiens
agagcaggagaaatcctactgcattattaatctgaaagcacaaggacagc

SEQ ID NO: 5948 - DNA, 50 bp, Homo sapiens
ctgtcttggtttgtatgggaaaatctgcgggttgtggaatattaggttct

SEQ ID NO: 5949 - DNA, 50 bp, Homo sapiens
tgggattatagggggagacaggagttgtggaattacaggagaggttcact

SEQ ID NO: 5950 - DNA, 50 bp, Homo sapiens; identical to SEQ ID NO: 5949

SEQ ID NO: 5951 - DNA, 50 bp, Homo sapiens
ctgagaaaaggagtgtctctcttctgctcccaaacttccagtagcttcca

SEQ ID NO: 5952 - DNA, 50 bp, Homo sapiens
tcgaggttcttcccaagaaaagcccaatcttataaactgttacttcccct

SEQ ID NO: 5953 - DNA, 50 bp, Homo sapiens
tgcaatgaggcagtggggtaaggttaaatcctctaaccgtctttgaatca

SEQ ID NO: 5954 - DNA, 50 bp, Homo sapiens
tggcaacttcaactccttgatggcgataatctctggtatgaatatgagcc

SEQ ID NO: 5955 - DNA, 50 bp, Homo sapiens
ttgtgctcctgatacgacgttgccacagttaatccgttctgatctctgct

SEQ ID NO: 5956 - DNA, 50 bp, Homo sapiens
caagcctaactttccaacactcccgcgacgcaaccccttcccctttcctc

SEQ ID NO: 5957 - DNA, 50 bp, Homo sapiens
cacggttagagtcaccaaacctgtatttcaggggacatctttccagctcc

SEQ ID NO: 5958 - DNA, 50 bp, Homo sapiens
ccaaaggctcactacccctgtgcgttgtccagcacacagacactatgtgc

SEQ ID NO: 5959 - DNA, 50 bp, Homo sapiens
tgcttgggaaatttggtttgtaaacctaaaatagcccttatttctgggga

SEQ ID NO: 5960 - DNA, 50 bp, Homo sapiens
catctgctgagcagtgtgctgtgtcaacctcctcctaggtctcctctatg

SEQ ID NO: 5961 - DNA, 50 bp, Homo sapiens
ctttctgcctgaagctgcccccatgactcccttctttgtgcaaaagcatg

SEQ ID NO: 5962 - DNA, 50 bp, Homo sapiens
gaaatgagttggtgtcttcacagaatgaggatccccagagccatcttgcc

SEQ ID NO: 5963 - DNA, 50 bp, Homo sapiens
gtctccctcccactctctgccttacctggtatctatgactcgactgaaat

SEQ ID NO: 5964 - DNA, 50 bp, Homo sapiens
tgcgagaggaagcagagaccaccttgaaactcgggtgcattaagtccttg

SEQ ID NO: 5965 - DNA, 50 bp, Homo sapiens
ttagccactgctattctaggttccttgatggagccccactcccacgccta

SEQ ID NO: 5966 - DNA, 50 bp, Homo sapiens
accacccagaggttgctggcttccttaataaagctaactttcctttcacc

SEQ ID NO: 5967 - DNA, 50 bp, Homo sapiens
aggggagccagtggtttttggtcatgggaagtgttctcataaaattcatt

SEQ ID NO: 5968 - DNA, 50 bp, Homo sapiens
gcaccagacttctgaacaggctgggagagtgaggcataaacacatgaaat

SEQ ID NO: 5969 - DNA, 50 bp, Homo sapiens
acacagtactttgttgagatgttggcttcttggtttatggcatgaattct

SEQ ID NO: 5970 - DNA, 50 bp, Homo sapiens
acttatcttttgccacccatgttcctggatgccttgccttcctctttcat

SEQ ID NO: 5971 - DNA, 50 bp, Homo sapiens
aaacaggaagcctctcatgaatttgaccaaggagctacattcgttctcta

SEQ ID NO: 5972 - DNA, 50 bp, Homo sapiens
tgaggaagaggagatttattaagccccttcttttaggctaggaggtttcc

SEQ ID NO: 5973 - DNA, 50 bp, Homo sapiens
ggacactggcttttgtgcagctcttcatcacagagtctgttgagctacaa

SEQ ID NO: 5974 - DNA, 50 bp, Homo sapiens
acagtgattttcaaccaaggggctttttcaaactacattccttagctccc

SEQ ID NO: 5975 - DNA, 50 bp, Homo sapiens
ggtggtggctacaagggtgattgccttatgataattgaccgtgtcataat

SEQ ID NO: 5976 - DNA, 50 bp, Homo sapiens
agctgggaggccattactttttgtctgagtcttctggagttctagcaaaa

SEQ ID NO: 5977 - DNA, 50 bp, Homo sapiens
agttgcattaaactgagcttagatgtgtaagtttgctaacggatgggttt

SEQ ID NO: 5978 - DNA, 50 bp, Homo sapiens
cctctaaggcatttatttactgacaacataaaatcttgaaccccaggtca

SEQ ID NO: 5979 - DNA, 50 bp, Homo sapiens
tcacctccatcaacttactagcacataaagggtgggatttcatgtgttga

SEQ ID NO: 5980 - DNA, 50 bp, Homo sapiens
ctggcaaaggcatgggtacaacctgctctgtgatctaccttctgaaccac

SEQ ID NO: 5981 - DNA, 50 bp, Homo sapiens
acacctgtggtatatttgtatcattcagtctggtttctcacccttcctaa

SEQ ID NO: 5982 - DNA, 50 bp, Homo sapiens
aaccctcgtaaggtttcatcttccttgattgcaaaatgagtttgtgtgaa

SEQ ID NO: 5983 - DNA, 50 bp, Homo sapiens
cccgcttcaccttccctaaataactcgtttgcaggctaattccatcaaat

SEQ ID NO: 5984 - DNA, 50 bp, Homo sapiens
attttgctcattacctgtcaggagaaaaccctccttccccagtctccact

SEQ ID NO: 5985 - DNA, 50 bp, Homo sapiens
acctactgaatctccagattgccaagtgaaacacaatggttgcctcttca

SEQ ID NO: 5986 - DNA, 50 bp, Homo sapiens
tgcgaaagctaattccctagtatgaataaacttcagaccttgctctcctt

SEQ ID NO: 5987 - DNA, 50 bp, Homo sapiens
agcctgaggtgggtgaagaaaatacctgctttatactgttctggaaactc

SEQ ID NO: 5988 - DNA, 50 bp, Homo sapiens
cttttccccttcatggtagttgctgcttaagtttctctaacatgcctgca

SEQ ID NO: 5989 - DNA, 50 bp, Homo sapiens
tgaatgtgcagatgcagaacccattgatatggagggctgagtgtctgaaa

SEQ ID NO: 5990 - DNA, 51 bp, Homo sapiens
tgtactacttatttatgtgtaaaccatacacagggctagaaaggaagggat

SEQ ID NO: 5991 - DNA, 50 bp, Homo sapiens
tgtagaattgcggagtagaaagacccttgaaagatcatttgtcctgtggt

SEQ ID NO: 5992 - DNA, 50 bp, Homo sapiens
gctcaagttcccagcacctggggaattctaagcctgaggaagacaaggtg

SEQ ID NO: 5993 - DNA, 50 bp, Homo sapiens
tgtttttatgtcctgagcaagcaaattgctgcaattaaaatcaccaattt

SEQ ID NO: 5994 - DNA, 51 bp, Homo sapiens
aggcctgatattgaaagcttttgatactgagatcctattaatctcagatga

SEQ ID NO: 5995 - DNA, 50 bp, Homo sapiens
tgttagtttgcttttgaaattctttggagggtactcttcagggcttcaca

SEQ ID NO: 5996 - DNA, 51 bp, Homo sapiens
tagtgattatctccaggaatcaagtacaaactttgaaaaaagactggaggt

SEQ ID NO: 5997 - DNA, 50 bp, Homo sapiens
tttgtcccaagggctcagactgaaagaatgcaatgtgagaggtatgccac

SEQ ID NO: 5998 - DNA, 50 bp, Homo sapiens
tctgtgaaaatctttctgcaaatgtctttgcttgcttgtactcacgtttt

SEQ ID NO: 5999 - DNA, 50 bp, Homo sapiens
tgtctttaacgcacagatgttacttcagcaccacaaggactgttgatgga

SEQ ID NO: 6000 - DNA, 50 bp, Homo sapiens
cagtcagatgttggaattgggggtagagggattatagagttgtgtgtgct

SEQ ID NO: 6001 - DNA, 50 bp, Homo sapiens
aaaggagggactatggcatcaaacagcctcttcagcacagtgacaccatg

SEQ ID NO: 6002 - DNA, 50 bp, Homo sapiens
acccagtttgtgcatagttcatgatcctctataaaaccagcttttgtgga

SEQ ID NO: 6003 - DNA, 50 bp, Homo sapiens; identical to SEQ ID NO: 4877

SEQ ID NO: 6004 - DNA, 50 bp, Homo sapiens
tggaatggactcttaaaacaatgaaagagcatttatcgtttgtcccttga

SEQ ID NO: 6005 - DNA, 50 bp, Homo sapiens
tcactaccttcaattgtttacaaggtggatatgggcaggcaacagatact

SEQ ID NO: 6006 - DNA, 50 bp, Homo sapiens
ctaggccggatgggccagagaaggagaaccatggcaggagccggaagcag

SEQ ID NO: 6007 - DNA, 50 bp, Homo sapiens
aaatgttgagcaactgttcaataacagcactaattgtgtgttcattggct

SEQ ID NO: 6008 - DNA, 50 bp, Homo sapiens
ctggcacatccaggttttagagcaggcagcctgagatttcaaaaatgagg

SEQ ID NO: 6009 - DNA, 50 bp, Homo sapiens
ggagcggaatacagtaaaagcactggactgacctaagagtttgtttctgc

SEQ ID NO: 6010 - DNA, 50 bp, Homo sapiens
acaccatttcagcgttggatcacagacagctcttcctttatatcccagca

SEQ ID NO: 6011 - DNA, 50 bp, Homo sapiens
ccaccttgctgccttttgaaacactcaggaaatatagttggctaaaactg

SEQ ID NO: 6012 - DNA, 50 bp, Homo sapiens
cacttcgcaacggagtgtttgaaattgtggtggtcctgatttataggatt

SEQ ID NO: 6013 - DNA, 50 bp, Homo sapiens
gctttggcagatggattaaccttgttcttttggagccagatcaatatcta

SEQ ID NO: 6014 - DNA, 50 bp, Homo sapiens
agaatgcctggttttcgtttgcaatttgcttgtgtaaatcaggttgtaaa

SEQ ID NO: 6015 - DNA, 50 bp, Homo sapiens; identical to SEQ ID NO: 1006

SEQ ID NO: 6016 - DNA, 50 bp, Homo sapiens
tgcaagtggatggtttggtatcactgtaaataaaaagagggcctgggaaa

SEQ ID NO: 6017 - DNA, 50 bp, Homo sapiens
gtggcttttctgttgacgccaaaggttactccctctgcctcaccataaaa

SEQ ID NO: 6018 - DNA, 50 bp, Homo sapiens
acctcctacgtctgttttctggctgtggtgacttgggatttttaacctta

SEQ ID NO: 6019 - DNA, 50 bp, Homo sapiens
atcgttggattatctttgaacccccttgtgtggatcattttgagccgcct

SEQ ID NO: 6020 - DNA, 50 bp, Homo sapiens
agctccaaagtggtttgatgaccacaggctaaaattcatagtcttaaaat

SEQ ID NO: 6021 - DNA, 50 bp, Homo sapiens
tcagaaaggagaaaacacagaccaaagagaagtatctaagaccaaaggga

SEQ ID NO: 6022 - DNA, 50 bp, Homo sapiens
gcatcacgatttgtctacataagtccagttcatctcgcgtttgttttggc

SEQ ID NO: 6023 - DNA, 50 bp, Homo sapiens
atacagggttccatccagaaagcattcagtcagagcaagttaaagtcagt

SEQ ID NO: 6024 - DNA, 50 bp, Homo sapiens
aagtgccagattttgataatcaccagcctctcattcaactcctatgttgc

SEQ ID NO: 6025 - DNA, 50 bp, Homo sapiens
acccttggtcactggtgtttcaaacattctggcaagtcacatcaatcaag

SEQ ID NO: 6026 - DNA, 50 bp, Homo sapiens
agctctggagcctttgcttcctcaaatacgagcgggaactgcgttgagcg

SEQ ID NO: 6027 - DNA, 50 bp, Homo sapiens
aagttgtcctgtgctaaagcaagcgtgggatgatcctacctacctctagg

SEQ ID NO: 6028 - DNA, 50 bp, Homo sapiens
atttggacagatgcagaaggaactgttagtgagtcaagacaaacacatct

SEQ ID NO: 6029 - DNA, 50 bp, Homo sapiens
cccctacccctggaaagtaatatactgaagtctcatcatactgttttggg

SEQ ID NO: 6030 - DNA, 50 bp, Homo sapiens; identical to SEQ ID NO: 1043

SEQ ID NO: 6031 - DNA, 50 bp, Homo sapiens
agctagtgatgttttgtccaaaggaagattctgacaacagcttcagcaga

SEQ ID NO: 6032 - DNA, 50 bp, Homo sapiens
acacagacatattgaccgcacacaacactgaaatggactgacttgagaaa

SEQ ID NO: 6033 - DNA, 50 bp, Homo sapiens; identical to SEQ ID NO: 4348

SEQ ID NO: 6034 - DNA, 50 bp, Homo sapiens
ggtccatgtcaccgtgagtacacccctatgattggtttgttgtcaagaag

SEQ ID NO: 6035 - DNA, 50 bp, Homo sapiens
tgctagttcaggtcctccaggcattgatttgtacagttaaactccgagtg

SEQ ID NO: 6036 - DNA, 50 bp, Homo sapiens; identical to SEQ ID NO: 4210

SEQ ID NO: 6037 - DNA, 50 bp, Homo sapiens
ggcctactgaccaaattgttgtgttgagatgatatttaactttttgccaa

SEQ ID NO: 6038 - DNA, 50 bp, Homo sapiens; identical to SEQ ID NO: 4297

SEQ ID NO: 6039 - DNA, 50 bp, Homo sapiens
cgatagaattgaagcagtccacggggaggggatgatacaaggagtaaacc

SEQ ID NO: 6040 - DNA, 50 bp, Homo sapiens
atagactccaaagaggcgttaagcacctggttttcctttggctcagaaaa

SEQ ID NO: 6041 - DNA, 50 bp, Homo sapiens
ctcaaacgaaattgggcaggccatttgcgtggtttctctggataagttcc

SEQ ID NO: 6042 - DNA, 50 bp, Homo sapiens
gcacatgacagtaagcgaggttttgggtaaatatagatgaggatgcctat

SEQ ID NO: 6043 - DNA, 50 bp, Homo sapiens
tcccagagtaactgacagtatcaaatagcaagagagttaggatgaggact

SEQ ID NO: 6044 - DNA, 50 bp, Homo sapiens
acacaggaaccgcttacccaccagctctgcccgcgtctctaccgccatag

SEQ ID NO: 6045 - DNA, 50 bp, Homo sapiens
ttcttccaagagaataaccctattaaaggctaaaaatggaagctcccagt

SEQ ID NO: 6046 - DNA, 50 bp, Homo sapiens
actgacctagcagatgtgtggaaaaggaatcagatcttgattcttctggg

SEQ ID NO: 6047 - DNA, 50 bp, Homo sapiens
acaactcaagtgaaaagatgtctccagtttctgaagataacgcacgctga

SEQ ID NO: 6048 - DNA, 50 bp, Homo sapiens
cgccgactcgttgaaagttttgttgtgtagttggttttcgttgagttctt

SEQ ID NO: 6049 - DNA, 50 bp, Homo sapiens
cacccacctggtaggaaggtcaatcttatgctcagaagtcccacccacca

SEQ ID NO: 6050 - DNA, 50 bp, Homo sapiens
caactccttaaagggttgaaggttgtgacaataactgagggaactgatgt

SEQ ID NO: 6051 - DNA, 50 bp, Homo sapiens
aaaacactccacctaaaagcaggaaagatggcaattctaaatagcagcta

SEQ ID NO: 6052 - DNA, 53 bp, Homo sapiens
ggaggttttgatcgtgactttattttgagatattgtatctttgttagtattgc

SEQ ID NO: 6053 - DNA, 50 bp, Homo sapiens
ttgtaaggttccggggaactgactcaacatggttctccaactcgaggttg

SEQ ID NO: 6054 - DNA, 50 bp, Homo sapiens
tgtgagtgttataggttacagtggattccaaactagccacaagtgaagca

SEQ ID NO: 6055 - DNA, 50 bp, Homo sapiens
tcagccaggaggaaaagcactctgattatgaattgagcagaaggaaacaa

SEQ ID NO: 6056 - DNA, 50 bp, Homo sapiens
gttcccactcgttcttgccggagaaacctgccttttcaagcataattcaa

SEQ ID NO: 6057 - DNA, 50 bp, Homo sapiens
gggtccaagattattgattaatttgggcaccgcgagagctcgagtccccc

SEQ ID NO: 6058 - DNA, 50 bp, Homo sapiens
gaccacctgtaaagcaagtcctttcaagtttcactgcacatcccaaacca

SEQ ID NO: 6059 - DNA, 50 bp, Homo sapiens
tggtccactgtcactgtttctctgctgttgcaaatacatggataacacat

SEQ ID NO: 6060 - DNA, 50 bp, Homo sapiens
agactctggaaaaggagggtcggagtattaaactggctgggaatgagagg

SEQ ID NO: 6061 - DNA, 50 bp, Homo sapiens
tgagagcacaccataaattcacagcaggaataaacgaagacacacgagca

SEQ ID NO: 6062 - DNA, 50 bp, Homo sapiens
acattctctcattttgctgaagctgatttgattgggtgtctgtttctcgc

SEQ ID NO: 6063 - DNA, 50 bp, Homo sapiens
tgagaaggtaaagtagaaagggaagatgatgagtgaacaataagccttgt

SEQ ID NO: 6064 - DNA, 50 bp, Homo sapiens
acattattccatgggaataagtcatcagtgcaaaggactgtaaggagtgc

SEQ ID NO: 6065 - DNA, 50 bp, Homo sapiens
cgccgctcctggagacctgataacttaggcttgaaataattgacttgtct

SEQ ID NO: 6066 - DNA, 50 bp, Homo sapiens
tgtatgtgcaatatgcttatgggtaattatgggcaagagaaatggaaaca

SEQ ID NO: 6067 - DNA, 50 bp, Homo sapiens
accccttggtaaagcagttgtaagaattaaacaagaggaattgctctttc

SEQ ID NO: 6068 - DNA, 50 bp, Homo sapiens
aaatcaggccccttgcgccattcacaaaaatccttgtgagatgactcaag

SEQ ID NO: 6069 - DNA, 50 bp, Homo sapiens
agggcagaggtcctttgggagggtaagctcacaaaaactcagggaggcag

SEQ ID NO: 6070 - DNA, 50 bp, Homo sapiens
tcatctccgccaaggttcccactaggcaggaaaggatttttatctaaagt

SEQ ID NO: 6071 - DNA, 50 bp, Homo sapiens
ccacccaagtcggaatccgagtgaaataaatagcatcgcccgccaactac

SEQ ID NO: 6072 - DNA, 50 bp, Homo sapiens
aggcacacgattgtcaccatttctccctttacaagctgtataatcagtaa

SEQ ID NO: 6073 - DNA, 50 bp, Homo sapiens
gcaacgtctgaatgtagtaatgtgactcagagcttcaaagtaagcattcg

SEQ ID NO: 6074 - DNA, 50 bp, Homo sapiens
gccaccccatctgggaggcccagcatccaattcagtcgccttcaatgatt

SEQ ID NO: 6075 - DNA, 50 bp, Homo sapiens
tgatagactggatgctgctatggtaatctgcctcaggaaaatgccggact

SEQ ID NO: 6076 - DNA, 50 bp, Homo sapiens
tggagccaagaagccactgactcaagaggatttcaagcgagagctgcttg

SEQ ID NO: 6077 - DNA, 50 bp, Homo sapiens
caacttttgtaacaggggacttagccgggggcaggaggggttcttgagac

SEQ ID NO: 6078 - DNA, 50 bp, Homo sapiens
acttgaaggcacatcttccttttggttgttttccatcttcaaattaaact

SEQ ID NO: 6079 - DNA, 51 bp, Homo sapiens
taaaaactgacatgacatgagatggtttaagtgtcaaacataagggtcttt

SEQ ID NO: 6080 - DNA, 50 bp, Homo sapiens
actgacataagcccacttcaggtgtttggaagacactaaagagaatcaga

SEQ ID NO: 6081 - DNA, 50 bp, Homo sapiens
gcagctttttgctggcgggggtctaaataaagtagcttccccaaaagaaa

SEQ ID NO: 6082 - DNA, 50 bp, Homo sapiens
acctggttatctcgcaatgacctagctaacacaaatgcaacatcagccgg

SEQ ID NO: 6083 - DNA, 50 bp, Homo sapiens
tgatcaaaatgaagatgctccaaccgtataaatggcagatgaaatagact

SEQ ID NO: 6084 - DNA, 50 bp, Homo sapiens
gcaggagagaaataccttctaatgggtgtggacactggaggaactgttac

SEQ ID NO: 6085 - DNA, 50 bp, Homo sapiens
agggcactgtttgttcctttaatatggagaaatatcgcaaataactggga

SEQ ID NO: 6086 - DNA, 50 bp, Homo sapiens
ttggcctatgttaatttctattctcagttcttctgtgcccttcctcctct

SEQ ID NO: 6087 - DNA, 50 bp, Homo sapiens
gaacgtaagcccgacgctaggcagtgctgttagaaagtgatttggaagag

SEQ ID NO: 6088 - DNA, 50 bp, Homo sapiens
atcccattctccctctcaaggcaggggtcatagatcctaagccataaaat

SEQ ID NO: 6089 - DNA, 50 bp, Homo sapiens
tgctgtaaaatggcagctccataggaacctattttccataggaacctgca

SEQ ID NO: 6090 - DNA, 50 bp, Homo sapiens
actggagaaaggtgtcttcctgtcctttcaggggctcctgcggggaattc

SEQ ID NO: 6091 - DNA, 50 bp, Homo sapiens
attatatttgtccctatcagaatcctcgaatccctagcagccagtccctg

SEQ ID NO: 6092 - DNA, 50 bp, Homo sapiens
tgctcactgtcttctggaagagacaagcactttcttgaaattcctaagca

SEQ ID NO: 6093 - DNA, 50 bp, Homo sapiens
caatcggatcattcttctcaacttgggcggctctttcctcccttccttcc

SEQ ID NO: 6094 - DNA, 50 bp, Homo sapiens
tgctttgggcagtagctgaagccgaagtatgaacagtccattttgtttct

SEQ ID NO: 6095 - DNA, 50 bp, Homo sapiens
cacagttgagtaggaggtcatgaagaagaagagatgatacctgccttacc

SEQ ID NO: 6096 - DNA, 50 bp, Homo sapiens
tttgtgtagcaaatgttcattaattgcctactttgtgccaaattcaggcc

SEQ ID NO: 6097 - DNA, 50 bp, Homo sapiens
tccagcattgtattgtctattgacacacaaagtttgaaaataaaggggca

SEQ ID NO: 6098 - DNA, 50 bp, Homo sapiens
cacccaccagaccgaggattccaaaagggggcgaaggcggagagcaaagg

SEQ ID NO: 6099 - DNA, 50 bp, Homo sapiens
tggactctgttttcaagaggaagaaacaactgacaaataagttgatgtca

SEQ ID NO: 6100 - DNA, 50 bp, Homo sapiens
atgttgaaactggttttaacttgtaatggtgtggctgatgttacccgacc

SEQ ID NO: 6101 - DNA, 50 bp, Homo sapiens
acacagatttgaagtctactgttctaaatggcctctacttcctgctgtca

SEQ ID NO: 6102 - DNA, 50 bp, Homo sapiens
ggaacttctgcttccacttacgatgaaggaacttgtactcaatccatcca

SEQ ID NO: 6103 - DNA, 50 bp, Homo sapiens
gaagccttcctgtggtcataacaagtctcacacaccccaaggactgatct

SEQ ID NO: 6104 - DNA, 50 bp, Homo sapiens
gagtccagcctttgaacctggcgctgaatcctgactttactgcttattca

SEQ ID NO: 6105 - DNA, 50 bp, Homo sapiens
aaactcatacatgcagaaaattgtctttgctcgaaatggtaatgccaaaa

SEQ ID NO: 6106 - DNA, 50 bp, Homo sapiens; identical to SEQ ID NO: 6105

SEQ ID NO: 6107 - DNA, 50 bp, Homo sapiens
acaaaagtcatggctgtgaggctatcattacccttttaccaaagttggaa

SEQ ID NO: 6108 - DNA, 53 bp, Homo sapiens
agttctatttctatcccaaactaagctatgtgaaataagagaagctactttgt

SEQ ID NO: 6109 - DNA, 50 bp, Homo sapiens
atcccgatggtgcccaccgctattaaaggttcgtttgttccacgattaaa

SEQ ID NO: 6110 - DNA, 50 bp, Homo sapiens
atgtctccatacccattacaatctccagcattccccctcaaacctaaaaa

SEQ ID NO: 6111 - DNA, 50 bp, Homo sapiens
gcccgtatttaccctatagcaccccctctaccccctttagagcccaaaaa

SEQ ID NO: 6112 - DNA, 50 bp, Homo sapiens
acattttcctccgcataagcctgcgtcagattaaaacactgaactgacaa

SEQ ID NO: 6113 - DNA, 50 bp, Homo sapiens
ccaagctggtttcaagccaaccccatggcctccatgactttttccaaaac

SEQ ID NO: 6114 - DNA, 50 bp, Homo sapiens
tgatcaggtgaaccggaagtctccaatttctgaatggattatgtttctaa

SEQ ID NO: 6115 - DNA, 50 bp, Homo sapiens
tgagtacgtgacacttgttgtagaatagtggtgttgagctatattcttgt

SEQ ID NO: 6116 - DNA, 50 bp, Homo sapiens
gtgacccttggcacccgctagaagtttatggccgagctttaccaattaaa

SEQ ID NO: 6117 - DNA, 50 bp, Homo sapiens
tgaactccaactttgaccaacccatgagacccctgttatccaaactttct

SEQ ID NO: 6118 - DNA, 50 bp, Homo sapiens
ccctctactatttggctccataacttaggacctgcctttcccggttccag

SEQ ID NO: 6119 - DNA, 50 bp, Homo sapiens
cccgtatttaccctatagcaccccctctaccccctttagagccccaaaaa

SEQ ID NO: 6120 - DNA, 50 bp, Homo sapiens
ccaactttcagaacagaagggtgggaaaccagaaccgcctgccatgcccc

SEQ ID NO: 6121 - DNA, 50 bp, Homo sapiens
gcgccagaaatccaatccagcccaaggatatagttaggattaattactta

SEQ ID NO: 6122 - DNA, 50 bp, Homo sapiens
ctgagattttgggttttccacacgggccaagatacccggcctctgctgag

SEQ ID NO: 6123 - DNA, 50 bp, Homo sapiens
atatcatttccacttagtattatacccacacccacccaagaacagggttt

SEQ ID NO: 6124 - DNA, 50 bp, Homo sapiens
acagcatgagaaactgttagtacgcatacctcagttcaaacctttaggga

SEQ ID NO: 6125 - DNA, 50 bp, Homo sapiens
gcttgccctagcagagtcatacggaataatggaaaactcaacttctgttc

SEQ ID NO: 6126 - DNA, 50 bp, Homo sapiens
cacaatgctgcctcctctgtggatgactgatggcaagagtctgaattgaa

SEQ ID NO: 6127 - DNA, 50 bp, Homo sapiens
cctctcactctcagactccaagggccaagaaaaactacggacaggaagcc

SEQ ID NO: 6128 - DNA, 50 bp, Homo sapiens
gagaggaggggtctcagacgttgggggacacactgctgggtgggtgattt

SEQ ID NO: 6129 - DNA, 50 bp, Homo sapiens
taagaaatcccaattttcaggagtggtggtgtcaataaacgctctgtggc

SEQ ID NO: 6130 - DNA, 50 bp, Homo sapiens
cggcagggtggcctgtaacaatttcagttttcgcagaacattcaggtatt

SEQ ID NO: 6131 - DNA, 50 bp, Homo sapiens
ggggctcccttcccggctttgttttctctgggagattttattttacctaa

SEQ ID NO: 6132 - DNA, 50 bp, Homo sapiens
gaaagtggagggagtggacggggaggagactagccagagaggctcattag

SEQ ID NO: 6133 - DNA, 50 bp, Homo sapiens
cttctcccctcttgccctctgtggtctgatttaaaacgaaaaggtcggat

SEQ ID NO: 6134 - DNA, 50 bp, Homo sapiens
ggacttctgaaatagagctggctccctggggtgacaatgtatatatgcaa

SEQ ID NO: 6135 - DNA, 50 bp, Homo sapiens
ctgggtgtcgtggaagatgacgaagatgctgggctggcagatgcagtcca

SEQ ID NO: 6136 - DNA, 50 bp, Homo sapiens
accagggcttaaaacctcaatttatgttcatgacagtggggatttttctt

SEQ ID NO: 6137 - DNA, 50 bp, Homo sapiens
attctccaaccacaaacagcacttctaaaactaactttactttctgccca

SEQ ID NO: 6138 - DNA, 50 bp, Homo sapiens
gatatagtctccataccccattaccatctcccagccattccccctccaac

SEQ ID NO: 6139 - DNA, 50 bp, Homo sapiens
tgatactttggttctctttcctgctcaggtcccttcatttgtactttgga

SEQ ID NO: 6140 - DNA, 50 bp, Homo sapiens
taatactggaggggcttgaagaaggctgtcgtgttttgtcacctgctttg

SEQ ID NO: 6141 - DNA, 50 bp, Homo sapiens
gtctttcccgtctttcttcctcacctatgtaatttcagtagtctctcagc

SEQ ID NO: 6142 - DNA, 50 bp, Homo sapiens
aggaagagcctgcacctgtggtggaacaatcagggaaaaggaagtcaaaa

SEQ ID NO: 6143 - DNA, 50 bp, Homo sapiens
tttggagcttctataggagtggagaggggcagctcattgttgagagttgc

SEQ ID NO: 6144 - DNA, 50 bp, Homo sapiens
tgatctgactggaaaacaatcctgtatcccctcccaaagaatcatgggct

SEQ ID NO: 6145 - DNA, 50 bp, Homo sapiens
tcatcccttaaacactctgtgatgggatcttcaggatcatcttttgaagt

SEQ ID NO: 6146 - DNA, 50 bp, Homo sapiens
tgcgtttggtttaggaatgtgcttttgtacttccacttgaataaaggtgt

SEQ ID NO: 6147 - DNA, 50 bp, Homo sapiens
tgctcagggcacatgcacacagacatttatctctgcactcacattttgtg

SEQ ID NO: 6148 - DNA, 50 bp, Homo sapiens
ggttattgctgacacgctgtcctctggcgacctgtcgctggagaggttgg

SEQ ID NO: 6149 - DNA, 50 bp, Homo sapiens
cgttttctgagcatccgttgtgccttaacattttctgcttgtcctttggg

SEQ ID NO: 6150 - DNA, 50 bp, Homo sapiens
cttctgaatgcccgagtcttctcttttgtgctcacaaatgccacccaatc

SEQ ID NO: 6151 - DNA, 50 bp, Homo sapiens
tgcttacaagggtgattgaccttgccttactctttatgtaaattatggca

SEQ ID NO: 6152 - DNA, 50 bp, Homo sapiens
ctggcgtattaccattttgatagcctctcttcaggctagataagctgggg

SEQ ID NO: 6153 - DNA, 50 bp, Homo sapiens
ccctgtattattgaaatgtcagcataatgactggaaggtgaaattggtcc

SEQ ID NO: 6154 - DNA, 50 bp, Homo sapiens
actgctgttgcatgaatagatgatacaaagcaagtgatgaggttggtatg

SEQ ID NO: 6155 - DNA, 50 bp, Homo sapiens
tggaagaacaaattcagacatcatcagtaagtctttagggacacagggaa

SEQ ID NO: 6156 - DNA, 50 bp, Homo sapiens
agtgaaaactggtacagtgttctgcttgatttacaacatgtaacttgtga

SEQ ID NO: 6157 - DNA, 50 bp, Homo sapiens
gccagaaagtgtgggctgaagatggttggtttcatgtttttgtattatgt

SEQ ID NO: 6158 - DNA, 50 bp, Homo sapiens
tgtcctctgaacctgagtgaagaaatatactctgtcctttgtacctgcgt

SEQ ID NO: 6159 - DNA, 50 bp, Homo sapiens
ccatttccactacatgcctttcctaccttcccttcacaaccaatcaagtg

SEQ ID NO: 6160 - DNA, 50 bp, Homo sapiens
acacttccctgaatgttgaagaagatatgctatccatgcaatccttgtcg

SEQ ID NO: 6161 - DNA, 50 bp, Homo sapiens
acttgtgtttgaaccacttctgcttcctctttaacctgagatgcacacgt

SEQ ID NO: 6162 - DNA, 50 bp, Homo sapiens; identical to SEQ ID NO: 6062

SEQ ID NO: 6163 - DNA, 50 bp, Homo sapiens
tgacagaatgaactggaaatgaaatcccacagttatgatcgtagtagagt

SEQ ID NO: 6164 - DNA, 50 bp, Homo sapiens
aagtacagatgccatcccggtgctgtgatcttccagccattctccatttc

SEQ ID NO: 6165 - DNA, 50 bp, Homo sapiens
actgccaatctgatttaaaattctccaagcttaattctgtgcaacaaaca

SEQ ID NO: 6166 - DNA, 50 bp, Homo sapiens
gcctgttgttctgtttatcgccctattttacaaaactgattctgacctgg

SEQ ID NO: 6167 - DNA, 50 bp, Homo sapiens
aactggcattgctaagccccagaaaaatgtatttagtggaacagatgaaa

SEQ ID NO: 6168 - DNA, 50 bp, Homo sapiens
acactaggtccttttatacctgtgcctttacgttcgttttcctgattgca

SEQ ID NO: 6169 - DNA, 50 bp, Homo sapiens
aatacagattcattttatttaagcgtccgtggcaccgacagggaccccag

SEQ ID NO: 6170 - DNA, 50 bp, Homo sapiens
agttcatcccctttcagaagctgtttgctcttggctcattaaacctgtga

SEQ ID NO: 6171 - DNA, 50 bp, Homo sapiens
gcctcttttcctgtatcacacaagggtcagggatggtggagtaaaagctc

SEQ ID NO: 6172 - DNA, 50 bp, Homo sapiens
tgttaggtggcctctgcatacctatgggaactcagtgatgtaatgcaaag

SEQ ID NO: 6173 - DNA, 50 bp, Homo sapiens
ctggggccgtagcaaaaatcatgaaaaacacttcaacgtgtcctttcaat

SEQ ID NO: 6174 - DNA, 50 bp, Homo sapiens
tgccaagtcagcagatttgctttatgaattacagggactagaaatgccca

SEQ ID NO: 6175 - DNA, 50 bp, Homo sapiens
ttgcatgtctcttcctaaatttcattgtgttgatttctaatccttcccgt

SEQ ID NO: 6176 - DNA, 50 bp, Homo sapiens; identical to SEQ ID NO: 4273

SEQ ID NO: 6177 - DNA, 50 bp, Homo sapiens
gaagtgacactgactgtatctacctctccttttcttcatcaggtgttcct

SEQ ID NO: 6178 - DNA, 50 bp, Homo sapiens; identical to SEQ ID NO: 5021

SEQ ID NO: 6179 - DNA, 50 bp, Homo sapiens
aattccaaaggagtgatgttggaatagtccctctaagggagagaaatgca

SEQ ID NO: 6180 - DNA, 50 bp, Homo sapiens
agcccctccaccccacccagtacttttacaatgtgttattaaagacccct

SEQ ID NO: 6181 - DNA, 50 bp, Homo sapiens
ccatccttgagaaatgtgggcaccaagtccataatctccataaatccaat

SEQ ID NO: 6182 - DNA, 50 bp, Homo sapiens
cgttgcattttcacatttgtgtggcaggacaagcatggggcaagagggac

SEQ ID NO: 6183 - DNA, 50 bp, Homo sapiens
tatgagtttatgcgttttcccagccctccgaatcactgactggggcgttt

SEQ ID NO: 6184 - DNA, 50 bp, Homo sapiens
ttgaaaagatgacatcgccccaagagccaaaaataaatgggaattgaaaa

SEQ ID NO: 6185 - DNA, 50 bp, Homo sapiens; identical to SEQ ID NO: 4224

SEQ ID NO: 6186 - DNA, 50 bp, Homo sapiens
tggtgatatctgcttagatttccctgtatctttgctgccctccttcaagt

SEQ ID NO: 6187 - DNA, 50 bp, Homo sapiens
agttggagctatctgtgcagcagtttctctacagttgtgcataaatgttt

SEQ ID NO: 6188 - DNA, 50 bp, Homo sapiens
cgtgggaggatgacaaagaagcatgagtcaccctgctggataaacttaga

SEQ ID NO: 6189 - DNA, 50 bp, Homo sapiens
gtggtttggtcagcatacacacttctcatttcatttgatgtacacagcca

SEQ ID NO: 6190 - DNA, 50 bp, Homo sapiens
acctgggatttcatttctgctgaaagaaataggaagaacaggactcactt

SEQ ID NO: 6191 - DNA, 50 bp, Homo sapiens
gggtgtgatgaatagcgaatcatctcaaatccttgagcactcagtctagt

SEQ ID NO: 6192 - DNA, 50 bp, Homo sapiens
agctttcaccacctcgcagttgtagagatagtccccgaaatattattcca

SEQ ID NO: 6193 - DNA, 50 bp, Homo sapiens
gtgtgaagtgacagccttgtgtgtgatgttttctgccttccccaagtttg

SEQ ID NO: 6194 - DNA, 51 bp, Homo sapiens; identical to SEQ ID NO: 5427

SEQ ID NO: 6195 - DNA, 50 bp, Homo sapiens
taagtggattggcagactccttgttgcttaagagtggctttctaggcagg

SEQ ID NO: 6196 - DNA, 51 bp, Homo sapiens; identical to SEQ ID NO: 5427

SEQ ID NO: 6197 - DNA, 50 bp, Homo sapiens; identical to SEQ ID NO: 5944

SEQ ID NO: 6198 - DNA, 50 bp, Homo sapiens; identical to SEQ ID NO: 6141

SEQ ID NO: 6199 - DNA, 50 bp, Homo sapiens
ggtccactctcactctttctctgctgttgcaaatacatggataacaccgt

SEQ ID NO: 6200 - DNA, 50 bp, Homo sapiens
cattcagtatttattgggaagacttgtcaagcaccatgataagtggtgga

SEQ ID NO: 6201 - DNA, 50 bp, Homo sapiens
agagggggaaggacttacatgacatcctactgggaatttgctagaaacca

SEQ ID NO: 6202 - DNA, 50 bp, Homo sapiens
ctggtgaagctgactccccaggtaaagagatatcagctctgcttcagact

SEQ ID NO: 6203 - DNA, 50 bp, Homo sapiens
ttgcttcttcctgctttatagagttcccgtaaaatacccttcaccctggc

SEQ ID NO: 6204 - DNA, 51 bp, Homo sapiens
tctgacctccgtgacgtttattaccagctgatgtcccgtacactgatttca

SEQ ID NO: 6205 - DNA, 50 bp, Homo sapiens
gggaagggtcagcaacgatttctcaccaaatcactacacagacacaaagg

SEQ ID NO: 6206 - DNA, 50 bp, Homo sapiens
accactaaatggttacactacaccaagacactaaaatggcagggagccct

SEQ ID NO: 6207 - DNA, 50 bp, Homo sapiens
aaattcaaatcacccttgatacccacttctttctcccacccaaatctgat

SEQ ID NO: 6208 - DNA, 51 bp, Homo sapiens
accatatcgtgcaaaatgtaatatggaatttccaaacatcaatgaagggat

SEQ ID NO: 6209 - DNA, 50 bp, Homo sapiens
aataagtaccgtatataaacacttctctttctctcctccacaatggcacg

SEQ ID NO: 6210 - DNA, 50 bp, Homo sapiens
agcatcactcttagaagaagcaactccttcccttgattctgtgtatttgg

SEQ ID NO: 6211 - DNA, 53 bp, Homo sapiens
tcaacccagaatctataatgtatgaaataaattaatagagaacccaacagatc

SEQ ID NO: 6212 - DNA, 50 bp, Homo sapiens
aaggtctccatctaacaggtagagcagttggtgcagatgagatgagcctg

SEQ ID NO: 6213 - DNA, 50 bp, Homo sapiens
ggtgatgataccacctccaatgaacagggaagcaagttcatcagtcaaca

SEQ ID NO: 6214 - DNA, 50 bp, Homo sapiens
agctgttggggctgcactgagctgcaatttttaacatggatttataactt

SEQ ID NO: 6215 - DNA, 50 bp, Homo sapiens
aaggaatttgttttccctatcctaactcagtaacagagggtttactccga

SEQ ID NO: 6216 - DNA, 50 bp, Homo sapiens
cgcacacattttctgtatggacaaatcctggattggcttcgttatttggt

SEQ ID NO: 6217 - DNA, 50 bp, Homo sapiens
ggtaatgaaacaatcatccagttaacaatcagcaaggttcttcagagcct

SEQ ID NO: 6218 - DNA, 51 bp, Homo sapiens
tggaagagtggactgaagaaagaacttatactctccctcctctaaaattga

SEQ ID NO: 6219 - DNA, 50 bp, Homo sapiens
tcctgggctattggctttatgatatcttttgagaaacaggattttcactt

SEQ ID NO: 6220 - DNA, 50 bp, Homo sapiens
accttttaaggatgtcttatttccaccccaactctccactccattttagt

SEQ ID NO: 6221 - DNA, 50 bp, Homo sapiens
gaaccttcaaaactgtcactttgagttccagaagagtccttcagcatctt

SEQ ID NO: 6222 - DNA, 50 bp, Homo sapiens
gtatttgggcttctccaagcagatcacgcagacgacggtgctacatttga

SEQ ID NO: 6223 - DNA, 50 bp, Homo sapiens
caagcatactggttctttccaagctcactgttctcaccacacggccccac

SEQ ID NO: 6224 - DNA, 50 bp, Homo sapiens
tccatatccatttctgacgttgaaccatttgacagtgccaaggactttgg

SEQ ID NO: 6225 - DNA, 50 bp, Homo sapiens
aagcctgtttttcactctaaaaattcaagaggacacgctaagaacgatca

SEQ ID NO: 6226 - DNA, 50 bp, Homo sapiens; identical to SEQ ID NO: 4276

SEQ ID NO: 6227 - DNA, 50 bp, Homo sapiens
gcgcacatggctattttgatacacaaagttgtgtttgctactttagaagc

SEQ ID NO: 6228 - DNA, 50 bp, Homo sapiens
aactcacgacaattgctacaaaacaccagggaggggctttttgtgttttt

SEQ ID NO: 6229 - DNA, 50 bp, Homo sapiens; identical to SEQ ID NO: 6141

SEQ ID NO: 6230 - DNA, 50 bp, Homo sapiens
gccctggtatgtatgcctttctctcctactgtctaatagcacctcgtaaa

SEQ ID NO: 6231 - DNA, 50 bp, Homo sapiens
aagaaaccgtggaagatactggtttatttcaaatgagcagagtatgttgt

SEQ ID NO: 6232 - DNA, 50 bp, Homo sapiens
ccacctcttctgacatgaatgtagcataagttagcaatcggttcttccaa

SEQ ID NO: 6233 - DNA, 50 bp, Homo sapiens
aggttccctttcaaataaagataaagaatttgacttgggacactgccaga

SEQ ID NO: 6234 - DNA, 50 bp, Homo sapiens
ggctggcctcattttgaaaagttagtacaattttcttcagtgctaacttg

SEQ ID NO: 6235 - DNA, 50 bp, Homo sapiens
actccagaacgtcagaaatggtgtagcagaatgaattctgttataaggaa

SEQ ID NO: 6236 - DNA, 50 bp, Homo sapiens
ctgttcgaaagttggagactgcctgtacccaggttgatagtcaattgttt

SEQ ID NO: 6237 - DNA, 50 bp, Homo sapiens
ccaccttgagcgccttcttctggttggttgtcatgcagttctcacacatg

SEQ ID NO: 6238 - DNA, 50 bp, Homo sapiens
acccttcccctttttcatatcctttcttcaaaaatctaaatgatgtgcct

SEQ ID NO: 6239 - DNA, 50 bp, Homo sapiens
agttccaggaggtggttttaaatattggatgaaaacttacaggctgtttt

SEQ ID NO: 6240 - DNA, 50 bp, Homo sapiens
acaatacatttacaaagccatctttacatgcattaaacgagggctacaac

SEQ ID NO: 6241 - DNA, 50 bp, Homo sapiens; identical to SEQ ID NO: 6240

SEQ ID NO: 6242 - DNA, 50 bp, Homo sapiens
ggcctgaagaaggagataagtgttccattcggcaacataagagaagttaa

SEQ ID NO: 6243 - DNA, 50 bp, Homo sapiens
tccatcccaaaggagagctactgtactgactgtacttgtggaatgcagcg

SEQ ID NO: 6244 - DNA, 50 bp, Homo sapiens
acccaccactctcaggaccacctgaaggcagaataaaccggatcctgttg

SEQ ID NO: 6245 - DNA, 50 bp, Homo sapiens
aaattgtgtgagaaggctgataaacgtctgtggtttctccctgtgctatt

SEQ ID NO: 6246 - DNA, 51 bp, Homo sapiens
gctgggcttctgcaaaattataaagttgctttattaaattcatacatgcgg

SEQ ID NO: 6247 - DNA, 51 bp, Homo sapiens
agctgattcattcattctatgtgtgccactaaataaagagattgagcaagt

SEQ ID NO: 6248 - DNA, 50 bp, Homo sapiens
cttgaagctgtgttggtggcctgtgaccttccaatgcaatctagactgtg

SEQ ID NO: 6249 - DNA, 50 bp, Homo sapiens
ctcatacacttctcagcctcagcacctaaccctcacacaacactccagta

SEQ ID NO: 6250 - DNA, 50 bp, Homo sapiens
tgagtattgttgtgggggcgggtatgtctgtatataaatctgtgcagcca

SEQ ID NO: 6251 - DNA, 50 bp, Homo sapiens; identical to SEQ ID NO: 4263

SEQ ID NO: 6252 - DNA, 50 bp, Homo sapiens; identical to SEQ ID NO: 4347

SEQ ID NO: 6253 - DNA, 50 bp, Homo sapiens; identical to SEQ ID NO: 4226

SEQ ID NO: 6254 - DNA, 50 bp, Homo sapiens; identical to SEQ ID NO: 4353

SEQ ID NO: 6255 - DNA, 50 bp, Homo sapiens
aggttgttatcaggtggcacaaattaaatccatcttgaagacttcacaca

SEQ ID NO: 6256 - DNA, 50 bp, Homo sapiens; identical to SEQ ID NO: 5073

SEQ ID NO: 6257 - DNA, 50 bp, Homo sapiens
agagctatgggtgctacaggcttgtctttctaagtgacatattcttatct

SEQ ID NO: 6258 - DNA, 50 bp, Homo sapiens
acccttataaaccagagcccaggaaagacagctcgagtgtataattctct

SEQ ID NO: 6259 - DNA, 50 bp, Homo sapiens
agctcctccctctcaacacccagtttccttgggagttgtcattaaaggaa

SEQ ID NO: 6260 - DNA, 50 bp, Homo sapiens
gctgtaattctctgtctcatcatccttctcttttgtttccatagcctttt

SEQ ID NO: 6261 - DNA, 50 bp, Homo sapiens; identical to SEQ ID NO: 4227

SEQ ID NO: 6262 - DNA, 50 bp, Homo sapiens; identical to SEQ ID NO: 4306

SEQ ID NO: 6263 - DNA, 50 bp, Homo sapiens; identical to SEQ ID NO: 4322

SEQ ID NO: 6264 - DNA, 50 bp, Homo sapiens; identical to SEQ ID NO: 4208

SEQ ID NO: 6265 - DNA, 50 bp, Homo sapiens
agaggcaacacttaaacactagggctactgtggcatctatgtagacagga

SEQ ID NO: 6266 - DNA, 50 bp, Homo sapiens; identical to SEQ ID NO: 4296

SEQ ID NO: 6267 - DNA, 50 bp, Homo sapiens; identical to SEQ ID NO: 4274

SEQ ID NO: 6268 - DNA, 50 bp, Homo sapiens; identical to SEQ ID NO: 4273

SEQ ID NO: 6269 - DNA, 50 bp, Homo sapiens; identical to SEQ ID NO: 4250

SEQ ID NO: 6270 - DNA, 50 bp, Homo sapiens; identical to SEQ ID NO: 238

SEQ ID NO: 6271 - DNA, 50 bp, Homo sapiens; identical to SEQ ID NO: 4305

SEQ ID NO: 6272 - DNA, 50 bp, Homo sapiens
acttcccctttaggtatccctggagtaataatgacaacaaaattcactgc

SEQ ID NO: 6273 - DNA, 50 bp, Homo sapiens; identical to SEQ ID NO: 4205

SEQ ID NO: 6274 - DNA, 50 bp, Homo sapiens; identical to SEQ ID NO: 5148

SEQ ID NO: 6275 - DNA, 50 bp, Homo sapiens; identical to SEQ ID NO: 5170

SEQ ID NO: 6276 - DNA, 50 bp, Homo sapiens; identical to SEQ ID NO: 5189

SEQ ID NO: 6277 - DNA, 50 bp, Homo sapiens; identical to SEQ ID NO: 5215

SEQ ID NO: 6278 - DNA, 50 bp, Homo sapiens; identical to SEQ ID NO: 5262

SEQ ID NO: 6279 - DNA, 50 bp, Homo sapiens; identical to SEQ ID NO: 5269

SEQ ID NO: 6280 - DNA, 50 bp, Homo sapiens; identical to SEQ ID NO: 5328

SEQ ID NO: 6281 - DNA, 50 bp, Homo sapiens; identical to SEQ ID NO: 5341

SEQ ID NO: 6282 - DNA, 51 bp, Homo sapiens
gcaactgttttctaggacatgtttactagaactactttaagtatgctgtgc

SEQ ID NO: 6283 - DNA, 50 bp, Homo sapiens; identical to SEQ ID NO: 5350

SEQ ID NO: 6284 - DNA, 50 bp, Homo sapiens; identical to SEQ ID NO: 5357

SEQ ID NO: 6285 - DNA, 50 bp, Homo sapiens; identical to SEQ ID NO: 5359

SEQ ID NO: 6286 - DNA, 50 bp, Homo sapiens; identical to SEQ ID NO: 5363

SEQ ID NO: 6287 - DNA, 50 bp, Homo sapiens; identical to SEQ ID NO: 5366

SEQ ID NO: 6288 - DNA, 50 bp, Homo sapiens; identical to SEQ ID NO: 5368

SEQ ID NO: 6289 - DNA, 50 bp, Homo sapiens; identical to SEQ ID NO: 5379

SEQ ID NO: 6290 - DNA, 50 bp, Homo sapiens; identical to SEQ ID NO: 5388

SEQ ID NO: 6291 - DNA, 50 bp, Homo sapiens; identical to SEQ ID NO: 5422

SEQ ID NO: 6292 - DNA, 50 bp, Homo sapiens; identical to SEQ ID NO: 5446

SEQ ID NO: 6293 - DNA, 50 bp, Homo sapiens; identical to SEQ ID NO: 5447

SEQ ID NO: 6294 - DNA, 50 bp, Homo sapiens; identical to SEQ ID NO: 5454

SEQ ID NO: 6295 - DNA, 50 bp, Homo sapiens; identical to SEQ ID NO: 5494

SEQ ID NO: 6296 - DNA, 50 bp, Homo sapiens; identical to SEQ ID NO: 5496

SEQ ID NO: 6297 - DNA, 50 bp, Homo sapiens; identical to SEQ ID NO: 5501

SEQ ID NO: 6298 - DNA, 50 bp, Homo sapiens; identical to SEQ ID NO: 5508

SEQ ID NO: 6299 - DNA, 50 bp, Homo sapiens; identical to SEQ ID NO: 5517

SEQ ID NO: 6300 - DNA, 50 bp, Homo sapiens; identical to SEQ ID NO: 5519

SEQ ID NO: 6301 - DNA, 50 bp, Homo sapiens; identical to SEQ ID NO: 5522

SEQ ID NO: 6302 - DNA, 50 bp, Homo sapiens; identical to SEQ ID NO: 5525

SEQ ID NO: 6303 - DNA, 50 bp, Homo sapiens; identical to SEQ ID NO: 5527

SEQ ID NO: 6304 - DNA, 50 bp, Homo sapiens; identical to SEQ ID NO: 5540

SEQ ID NO: 6305 - DNA, 50 bp, Homo sapiens; identical to SEQ ID NO: 5542

SEQ ID NO: 6306 - DNA, 50 bp, Homo sapiens; identical to SEQ ID NO: 5543

SEQ ID NO: 6307 - DNA, 50 bp, Homo sapiens; identical to SEQ ID NO: 5552

SEQ ID NO: 6308 - DNA, 50 bp, Homo sapiens; identical to SEQ ID NO: 5559

SEQ ID NO: 6309 - DNA, 50 bp, Homo sapiens; identical to SEQ ID NO: 5571

SEQ ID NO: 6310 - DNA, 50 bp, Homo sapiens; identical to SEQ ID NO: 5682

SEQ ID NO: 6311 - DNA, 50 bp, Homo sapiens; identical to SEQ ID NO: 5712

SEQ ID NO: 6312 - DNA, 50 bp, Homo sapiens; identical to SEQ ID NO: 5714

SEQ ID NO: 6313 - DNA, 50 bp, Homo sapiens; identical to SEQ ID NO: 5723

SEQ ID NO: 6314 - DNA, 50 bp, Homo sapiens; identical to SEQ ID NO: 5725

SEQ ID NO: 6315 - DNA, 50 bp, Homo sapiens; identical to SEQ ID NO: 5775

SEQ ID NO: 6316 - DNA, 50 bp, Homo sapiens; identical to SEQ ID NO: 5938

SEQ ID NO: 6317 - DNA, 50 bp, Homo sapiens; identical to SEQ ID NO: 5944

SEQ ID NO: 6318 - DNA, 50 bp, Homo sapiens; identical to SEQ ID NO: 5953

SEQ ID NO: 6319 - DNA, 50 bp, Homo sapiens; identical to SEQ ID NO: 5954

SEQ ID NO: 6320 - DNA, 50 bp, Homo sapiens; identical to SEQ ID NO: 5959

SEQ ID NO: 6321 - DNA, 50 bp, Homo sapiens; identical to SEQ ID NO: 5961

SEQ ID NO: 6322 - DNA, 50 bp, Homo sapiens; identical to SEQ ID NO: 6002

SEQ ID NO: 6323 - DNA, 50 bp, Homo sapiens; identical to SEQ ID NO: 6010

SEQ ID NO: 6324 - DNA, 50 bp, Homo sapiens
tggcataatgttggattgaatctacattttggcagaagttaaacattccc

SEQ ID NO: 6325 - DNA, 50 bp, Homo sapiens; identical to SEQ ID NO: 6014

SEQ ID NO: 6326 - DNA, 50 bp, Homo sapiens; identical to SEQ ID NO: 6019

SEQ ID NO: 6327 - DNA, 50 bp, Homo sapiens; identical to SEQ ID NO: 6023

SEQ ID NO: 6328 - DNA, 50 bp, Homo sapiens; identical to SEQ ID NO: 6027

SEQ ID NO: 6329 - DNA, 50 bp, Homo sapiens; identical to SEQ ID NO: 6031

SEQ ID NO: 6330 - DNA, 50 bp, Homo sapiens; identical to SEQ ID NO: 6032

SEQ ID NO: 6331 - DNA, 50 bp, Homo sapiens; identical to SEQ ID NO: 4348

SEQ ID NO: 6332 - DNA, 50 bp, Homo sapiens; identical to SEQ ID NO: 6037

SEQ ID NO: 6333 - DNA, 50 bp, Homo sapiens; identical to SEQ ID NO: 6039

SEQ ID NO: 6334 - DNA, 50 bp, Homo sapiens; identical to SEQ ID NO: 6041

SEQ ID NO: 6335 - DNA, 50 bp, Homo sapiens; identical to SEQ ID NO: 6042

SEQ ID NO: 6336 - DNA, 50 bp, Homo sapiens; identical to SEQ ID NO: 6044

SEQ ID NO: 6337 - DNA, 50 bp, Homo sapiens; identical to SEQ ID NO: 6047

SEQ ID NO: 6338 - DNA, 50 bp, Homo sapiens; identical to SEQ ID NO: 6051

SEQ ID NO: 6339 - DNA, 50 bp, Homo sapiens; identical to SEQ ID NO: 6065

SEQ ID NO: 6340 - DNA, 50 bp, Homo sapiens; identical to SEQ ID NO: 6088

SEQ ID NO: 6341 - DNA, 50 bp, Homo sapiens; identical to SEQ ID NO: 6124

SEQ ID NO: 6342 - DNA, 50 bp, Homo sapiens; identical to SEQ ID NO: 6126

SEQ ID NO: 6343 - DNA, 50 bp, Homo sapiens; identical to SEQ ID NO: 6129

SEQ ID NO: 6344 - DNA, 50 bp, Homo sapiens; identical to SEQ ID NO: 6130

SEQ ID NO: 6345 - DNA, 50 bp, Homo sapiens
gctggagggagaggcactggggaatttttcctggtgaatactgaagttac

SEQ ID NO: 6346 - DNA, 50 bp, Homo sapiens; identical to SEQ ID NO: 6139

SEQ ID NO: 6347 - DNA, 50 bp, Homo sapiens
actgccagtgaagactgtaaagacagaacacactattttggagggaggat

SEQ ID NO: 6348 - DNA, 50 bp, Homo sapiens; identical to SEQ ID NO: 6142

SEQ ID NO: 6349 - DNA, 50 bp, Homo sapiens; identical to SEQ ID NO: 6143

SEQ ID NO: 6350 - DNA, 50 bp, Homo sapiens; identical to SEQ ID NO: 6144

SEQ ID NO: 6351 - DNA, 50 bp, Homo sapiens; identical to SEQ ID NO: 6149

SEQ ID NO: 6352 - DNA, 50 bp, Homo sapiens; identical to SEQ ID NO: 6154

SEQ ID NO: 6353 - DNA, 50 bp, Homo sapiens; identical to SEQ ID NO: 6156

SEQ ID NO: 6354 - DNA, 50 bp, Homo sapiens; identical to SEQ ID NO: 6158

SEQ ID NO: 6355 - DNA, 50 bp, Homo sapiens; identical to SEQ ID NO: 6159

SEQ ID NO: 6356 - DNA, 50 bp, Homo sapiens; identical to SEQ ID NO: 6169

SEQ ID NO: 6357 - DNA, 50 bp, Homo sapiens; identical to SEQ ID NO: 6171

SEQ ID NO: 6358 - DNA, 50 bp, Homo sapiens; identical to SEQ ID NO: 6173

SEQ ID NO: 6359 - DNA, 50 bp, Homo sapiens; identical to SEQ ID NO: 5309

SEQ ID NO: 6360 - DNA, 50 bp, Homo sapiens
aaggcaaccaaccacattagaagtcttggcactttgtaacggaacgggta

SEQ ID NO: 6361 - DNA, 50 bp, Homo sapiens; identical to SEQ ID NO: 6177

SEQ ID NO: 6362 - DNA, 50 bp, Homo sapiens; identical to SEQ ID NO: 6179

SEQ ID NO: 6363 - DNA, 50 bp, Homo sapiens; identical to SEQ ID NO: 6180

SEQ ID NO: 6364 - DNA, 50 bp, Homo sapiens; identical to SEQ ID NO: 6181

SEQ ID NO: 6365 - DNA, 50 bp, Homo sapiens; identical to SEQ ID NO: 6183

SEQ ID NO: 6366 - DNA, 50 bp, Homo sapiens; identical to SEQ ID NO: 6187

SEQ ID NO: 6367 - DNA, 50 bp, Homo sapiens; identical to SEQ ID NO: 6188

SEQ ID NO: 6368 - DNA, 50 bp, Homo sapiens; identical to SEQ ID NO: 6189

SEQ ID NO: 6369 - DNA, 50 bp, Homo sapiens; identical to SEQ ID NO: 6193

SEQ ID NO: 6370 - DNA, 50 bp, Homo sapiens; identical to SEQ ID NO: 6141

SEQ ID NO: 6371 - DNA, 50 bp, Homo sapiens; identical to SEQ ID NO: 1043

SEQ ID NO: 6372 - DNA, 50 bp, Homo sapiens
gtggaaatcagcacacaaccacaatgacatttaagcacaggatcattatt

SEQ ID NO: 6373 - DNA, 50 bp, Homo sapiens
agaatggcagacctgtttgctgaagtgttcataagataacaataggcttg

SEQ ID NO: 6374 - DNA, 50 bp, Homo sapiens
tgggattttgtttttaagtcatttggtttggggaggaccttgtttatttt

SEQ ID NO: 6375 - DNA, 50 bp, Homo sapiens
tggacaaactgacagggactgctttgaaagacaggtactcagttgagtat

SEQ ID NO: 6376 - DNA, 50 bp, Homo sapiens; identical to SEQ ID NO: 6225

SEQ ID NO: 6377 - DNA, 50 bp, Homo sapiens; identical to SEQ ID NO: 6233

SEQ ID NO: 6378 - DNA, 50 bp, Homo sapiens; identical to SEQ ID NO: 6236

SEQ ID NO: 6379 - DNA, 50 bp, Homo sapiens
agcagagttaagtttaaatttccattctcactagtttgtgacctttgcca

SEQ ID NO: 6380 - DNA, 50 bp, Homo sapiens; identical to SEQ ID NO: 6250

SEQ ID NO: 6381 - DNA, 50 bp, Homo sapiens
cccttgcagatacatgagacaggcaggggctggagtcttgttccatcctg

SEQ ID NO: 6382 - DNA, 50 bp, Homo sapiens
gagtagttgtctttcctggcactaacgttgagctcgtgtacgcactgaag

SEQ ID NO: 6383 - DNA, 50 bp, Homo sapiens
gagtccaatctacactctagtagtgaagacagaagagttggcatacgagt

SEQ ID NO: 6384 - DNA, 50 bp, Homo sapiens
ggctgaacttactcattaagccacataacttcgagtcaagttccagtcca

SEQ ID NO: 6385 - DNA, 50 bp, Homo sapiens
gctctcaagcctcctccaataaagctctatcgggaaacaaatgaaccagt

SEQ ID NO: 6386 - DNA, 50 bp, Homo sapiens
aggaatgcacacattgctccaggatcactgtgaggattaaaggagatggt

SEQ ID NO: 6387 - DNA, 50 bp, Homo sapiens
agtaacggaacagttcccagtactcctggttcctaggtgagcaggtgatg

SEQ ID NO: 6388 - DNA, 50 bp, Homo sapiens
ggtgtgaaccatgagaagttcgacaacagcctcaagatcatcagcaatga

SEQ ID NO: 6389 - DNA, 50 bp, Homo sapiens
ggaggtgtataggctgggatttgaaaaggaaaataatcagcgtggtgcca

SEQ ID NO: 6390 - DNA, 50 bp, Homo sapiens; identical to SEQ ID NO: 326

SEQ ID NO: 6391 - DNA, 50 bp, Homo sapiens
tccagcagatataggaagcagtgtatctaaacagacaaataaaaaggcct

SEQ ID NO: 6392 - DNA, 50 bp, Homo sapiens
atctagtgtacgagacttggagtcaggcagtgagactggtggggcacggg

SEQ ID NO: 6393 - DNA, 50 bp, Homo sapiens
tggtttaatggaaaatgctctggaaaattcttttgcaacagttcatcgct

SEQ ID NO: 6394 - DNA, 50 bp, Homo sapiens
cactaaaagagtggggaggtgcagcacctggctggggaacaagaatatgg

SEQ ID NO: 6395 - DNA, 50 bp, Homo sapiens
aaacgaatcacgtgcctcgaaagggacatatattgttcctttaagcattt

SEQ ID NO: 6396 - DNA, 50 bp, Homo sapiens
aagggttcaatttcttctttggaaggtgatggtaagggtgtggctccaga

SEQ ID NO: 6397 - DNA, 50 bp, Homo sapiens
tggacaattccaagtccaagaggactgtctactttcgaccttgtgtgatt

SEQ ID NO: 6398 - DNA, 50 bp, Homo sapiens
ttgtgttaacctgttgtccacgctaagatacaaacttcccggaggaaagt

SEQ ID NO: 6399 - DNA, 50 bp, Homo sapiens
tgtcacagtgttctattatttgcccggttcttaaagtgagagcatcctga

SEQ ID NO: 6400 - DNA, 50 bp, Homo sapiens
acaatgatattgatgaggcacccagtcttttcatttactctgagtgaagt

SEQ ID NO: 6401 - DNA, 50 bp, Homo sapiens; identical to SEQ ID NO: 3230

SEQ ID NO: 6402 - DNA, 50 bp, Homo sapiens
ggccagagaccctaagctgcttaatacatttataccacatccttctcagc

SEQ ID NO: 6403 - DNA, 50 bp, Homo sapiens
cccttggaattacttgttcaacttctttctttcccactagacggggactt

SEQ ID NO: 6404 - DNA, 50 bp, Homo sapiens
ctttgtagatgcagagagaagctataagaaaccccagtacttgccgggcg

SEQ ID NO: 6405 - DNA, 54 bp, Homo sapiens
actgccacatctgactttacagaataaccaatgtaagttaaaatagagaaacag

SEQ ID NO: 6406 - DNA, 50 bp, Homo sapiens
agtcttgcgagtcaactcagactcaaatgtagaactgggaaggacagtgc

SEQ ID NO: 6407 - DNA, 50 bp, Homo sapiens
agcactgtgcagatggctttagaagattcagaacagaagcacaatctgtt

SEQ ID NO: 6408 - DNA, 50 bp, Homo sapiens
agcactgtgcagatggctttggaagattcagaacagaagcacaatctgtt

SEQ ID NO: 6409 - DNA, 50 bp, Homo sapiens
ctatggagtcttggaggacactggagtcaccatgctaacactgtgcagat

SEQ ID NO: 6410 - DNA, 50 bp, Homo sapiens
ccctgtcacccttcgtggccagtgccagacagtaactagtggatgctaaa

SEQ ID NO: 6411 - DNA, 50 bp, Homo sapiens
gagagaatagggtagagagaccgggacttgggtagagatgaccgggattc

SEQ ID NO: 6412 - DNA, 50 bp, Homo sapiens
agtggaagctaggagaaatatcgaatgtgttagggactttgaagttacca

SEQ ID NO: 6413 - DNA, 50 bp, Homo sapiens
ctgcatctctctttactaccagtgattacaaagtggggtttggtgggagt

SEQ ID NO: 6414 - DNA, 50 bp, Homo sapiens
tctctgacttcttattaccaaggacactctatctgttgcctcttactctt

SEQ ID NO: 6415 - DNA, 50 bp, Homo sapiens
cagttcccagatgtgcgtgttgtggtccccaagtatcaccttccaatttc

SEQ ID NO: 6416 - DNA, 50 bp, Homo sapiens
aacgaccctgtattgcagaagattgtagacattctgtatgccacagatga

SEQ ID NO: 6417 - DNA, 50 bp, Homo sapiens
gggtcccgagcccttcaagagctagatttactcaagtttgttcccttgcc

SEQ ID NO: 6418 - DNA, 50 bp, Homo sapiens
cactgaagccaaaccacagaagacttttgagaatgaggagacaaatgagt

SEQ ID NO: 6419 - DNA, 50 bp, Homo sapiens
aggtgaaaattactcttcagaagatagcagagtggataatggcccatcga

SEQ ID NO: 6420 - DNA, 50 bp, Homo sapiens
tgcagtgagactacatttctgtctaaagaagatgtgtgagttccgtcctt

SEQ ID NO: 6421 - DNA, 50 bp, Homo sapiens
tccagccagccagctcatttcactttacaccctcatggactgggattata

SEQ ID NO: 6422 - DNA, 50 bp, Homo sapiens
tttcatacattggaactccacctgactttggaccaaccccagaacagagc

SEQ ID NO: 6423 - DNA, 50 bp, Homo sapiens
agcaccggaatacaaaaatgatactatgctgccctcctagatctcaggga

SEQ ID NO: 6424 - DNA, 50 bp, Homo sapiens
tgcccatacacatgagtatttgtctaaaacatgtcttctttgtagcagct

SEQ ID NO: 6425 - DNA, 50 bp, Homo sapiens
gcaaatctaaactgcaggaaaatttttgcacccgaagtattcagatccct

SEQ ID NO: 6426 - DNA, 50 bp, Homo sapiens
ggcccagtgctaatgtaaccaatgatgccatgtcgatattggaaaccata

SEQ ID NO: 6427 - DNA, 50 bp, Homo sapiens
ggggaagaacaagataatctagtgacctcaccacagtctatgcccaggcc

SEQ ID NO: 6428 - DNA, 50 bp, Homo sapiens
aattcaactgaaggcgaggaatgttggtgatgaagctgagatcaggactc

SEQ ID NO: 6429 - DNA, 50 bp, Homo sapiens
cacctatatcgaaagtttgggctcatctcccattggtggcaaagacctcc

SEQ ID NO: 6430 - DNA, 50 bp, Homo sapiens
tggtggaaaagtgtgtctgtctgacaattacactcaagtttacctctggt

SEQ ID NO: 6431 - DNA, 53 bp, Homo sapiens
acgataatactgttggttactgccataaatattggaagctaatgtaaaatgca

SEQ ID NO: 6432 - DNA, 50 bp, Homo sapiens
ttctcttataaaggacagcaagtttaaaatggagcaaggagcattggaaa

SEQ ID NO: 6433 - DNA, 50 bp, Homo sapiens
tggccaaagaatagaagctctagaccttccttatttctatcgtgaaaaca

SEQ ID NO: 6434 - DNA, 50 bp, Homo sapiens
acatgacctgtgcagtgtgtggctgtgaattctgttggctttgtatgaaa

SEQ ID NO: 6435 - DNA, 50 bp, Homo sapiens
tgacataactaccatccctgcaactaatgaacccaccctcacagcttcct

SEQ ID NO: 6436 - DNA, 50 bp, Homo sapiens
gaatgacataaaccccctccggtctgaggtccggccttccagcttgtctc

SEQ ID NO: 6437 - DNA, 50 bp, Homo sapiens
gcctttctcactccatccccacccaaagtgctcagaccttgtctagttat

SEQ ID NO: 6438 - DNA, 50 bp, Homo sapiens
tcgttttacaacgtcgtgactgggaaaaccctggcgttacccaacttaat

SEQ ID NO: 6439 - DNA, 50 bp, Homo sapiens
tgttttgttttctgaaacgaaatcctgctctgttggcccagctagaacgc

SEQ ID NO: 6440 - DNA, 50 bp, Homo sapiens
cagaagctggatgacgttgctccatcttcactctgttaatgagacatgat

SEQ ID NO: 6441 - DNA, 50 bp, Homo sapiens
cacatcttccattcagccctaccatgaaaaccgtacctcgggcgcgacca

SEQ ID NO: 6442 - DNA, 50 bp, Homo sapiens
aatttgctttaaattgagtttccttgccattgcacactcctatctttctg

SEQ ID NO: 6443 - DNA, 50 bp, Homo sapiens
cagatgacacgcgctctccaccacccaacccaaaccatgagaatttgcaa

SEQ ID NO: 6444 - DNA, 50 bp, Homo sapiens
cccatgctgttgattgctaaatgtaacagtctgatcgtgacgctgaataa

SEQ ID NO: 6445 - DNA, 50 bp, Homo sapiens
gacacagacagaccaagctatagtcagacctggttacacacatacacaca

SEQ ID NO: 6446 - DNA, 50 bp, Homo sapiens
tggcaaagatcactgaaatttaggacaccaaagctaaaaccccaaatgct

SEQ ID NO: 6447 - DNA, 50 bp, Homo sapiens
gcttgtgctcgagaccgcttgctatagaaacgctgagctgctggtttatg

SEQ ID NO: 6448 - DNA, 50 bp, Homo sapiens
ctggttaaaagccccattactgaccttcgccgccaccacgcctatcacta

SEQ ID NO: 6449 - DNA, 50 bp, Homo sapiens
gcatccacctccttctctgtctcatgtgtgctcttcttctttctacagta

SEQ ID NO: 6450 - DNA, 50 bp, Homo sapiens
ttaaatctatcaagaattcatccaaattggtaccctgccgggccgcctcg

SEQ ID NO: 6451 - DNA, 50 bp, Homo sapiens
agtgctgtattgactttgctcggcagtagatgaagctattctgaacccaa

SEQ ID NO: 6452 - DNA, 50 bp, Homo sapiens
tgctggacaaagacaatgagatgattattggtggtgggatggctgttacc

SEQ ID NO: 6453 - DNA, 50 bp, Homo sapiens
gtggaaaagtcactaccaggctggcagggaatggggcaatctattcatac

SEQ ID NO: 6454 - DNA, 50 bp, Homo sapiens
aagggacagggagcgggcacaaaataaaacttagtttggtagaaattata

SEQ ID NO: 6455 - DNA, 50 bp, Homo sapiens
tcaaagcactggagatgagagccaggatggacccgaaaagaattttacag

SEQ ID NO: 6456 - DNA, 56 bp, Homo sapiens
caggaacatggctgcagcatataaaaagaattgaattccatacttttgttaaccct

SEQ ID NO: 6457 - DNA, 50 bp, Homo sapiens
ttgccataaccacgcttgtagattagttcatttactgacttcagattggg

SEQ ID NO: 6458 - DNA, 50 bp, Homo sapiens
ttacaggcaaccggagcatccaatcacctttctctaagagagtacctcgg

SEQ ID NO: 6459 - DNA, 50 bp, Homo sapiens
aaaagcatcttcgagagggactgtcaattctcgactattttccaacccgc

SEQ ID NO: 6460 - DNA, 50 bp, Homo sapiens; identical to SEQ ID NO: 2020

SEQ ID NO: 6461 - DNA, 50 bp, Homo sapiens
agagacacctaaattacagatttgtgagctgagagctggagtttttcatt

SEQ ID NO: 6462 - DNA, 50 bp, Homo sapiens
aacagcaaagagagttacgaattacgttacttccagattaaccaggacga

SEQ ID NO: 6463 - DNA, 50 bp, Homo sapiens
agcgcaagatagatttggaataggaataagctctagttcttaacaaccga

SEQ ID NO: 6464 - DNA, 50 bp, Homo sapiens
gcatggacaagatgccaaggcccggatgctttaggatgaagttcttatct

SEQ ID NO: 6465 - DNA, 50 bp, Homo sapiens
cctccagtcaccatacacaggttaccagtgtcgaacttgatgaaatcagt

SEQ ID NO: 6466 - DNA, 50 bp, Homo sapiens
ccaaacatctggacttgtgactgtaaaaggggaggaggtagccaatgatt

SEQ ID NO: 6467 - DNA, 50 bp, Homo sapiens
ttatggtggtcggggtgggtggtagttcaatgggaggtatgggatttatt

SEQ ID NO: 6468 - DNA, 50 bp, Homo sapiens
agctgtctggctcaaagatctacattctgaagttggctggaaatgtcttg

SEQ ID NO: 6469 - DNA, 50 bp, Homo sapiens
ctggttcctaccagtgccagtgccttcagggcttcacaggccagtacctc

SEQ ID NO: 6470 - DNA, 50 bp, Homo sapiens
tgacacagactgtttcaatcttggagcagcgactgactttgacagaagat

SEQ ID NO: 6471 - DNA, 50 bp, Homo sapiens
tgctatttaaagcaccatgataaatatgaggccacttggaaatccatcca

SEQ ID NO: 6472 - DNA, 50 bp, Homo sapiens
gcaggcgatgctctataatctaaaatgtatctctctttccctaagctgaa

SEQ ID NO: 6473 - DNA, 50 bp, Homo sapiens
aagtaagaccacctgtgaacttgatcattatctggcgcacataggaagat

SEQ ID NO: 6474 - DNA, 50 bp, Homo sapiens
gctggggctgggaattgcgtgggctaatgtgtcatttgacttaagaaact

SEQ ID NO: 6475 - DNA, 50 bp, Homo sapiens
tttgggaagaaccgattgctaaattatgcctaattcatgtcagaagaggg

SEQ ID NO: 6476 - DNA, 50 bp, Homo sapiens
aagcagtataccatttatatagcaaacagccagtggccagttcactgtat

SEQ ID NO: 6477 - DNA, 50 bp, Homo sapiens
ctgccctttggtagtgagaggaccacgccaatgatgcttttaagtaacct

SEQ ID NO: 6478 - DNA, 50 bp, Homo sapiens
catttcttcatctctaaggcacacttgctacccctctttgctgaccccag

SEQ ID NO: 6479 - DNA, 50 bp, Homo sapiens
gcctgcgtgtctgtctcagtgtttcctggtcctcctctaagtactctaaa

SEQ ID NO: 6480 - DNA, 50 bp, Homo sapiens
aatcctagacatgtgcttgtcattgctcccatgaaggtagttttcaaaca

SEQ ID NO: 6481 - DNA, 50 bp, Homo sapiens
accaatagagaagaagctctagaagacaaaatcccaaaccttggcacaaa

SEQ ID NO: 6482 - DNA, 50 bp, Homo sapiens
ggcttcaacagaaacatcaaatgccaagaccagtgagagagcgtcaaaaa

SEQ ID NO: 6483 - DNA, 50 bp, Homo sapiens
gcaagcccactaaaataaacatctaaccagcatctttcccccattatagg

SEQ ID NO: 6484 - DNA, 50 bp, Homo sapiens
atggatctgttcctctgtgctaaatgtcttgtggcagggtgtgtttgtgg

SEQ ID NO: 6485 - DNA, 50 bp, Homo sapiens
gccgtaatgtctcgggatctctaataatagaggaggtgagttgtggtgtc

SEQ ID NO: 6486 - DNA, 50 bp, Homo sapiens
aggcactcctcaaccagtgttcactgaattcaactgctgaaattgtaaca

SEQ ID NO: 6487 - DNA, 50 bp, Homo sapiens
agagagggttttaagggagggcttgtgaatacttgggagaatacggaagg

SEQ ID NO: 6488 - DNA, 50 bp, Homo sapiens
atgaatttgaagacatggtggctgaaaagcggctcatcccagatggctgt

SEQ ID NO: 6489 - DNA, 50 bp, Homo sapiens
ttccacagataggtaagccaggcgcggcaagatgagactgtattcagtta

SEQ ID NO: 6490 - DNA, 50 bp, Homo sapiens
tcttgtcctagtcattgtggcaaccccatctgacaccttgtgtagtacct

SEQ ID NO: 6491 - DNA, 50 bp, Homo sapiens; identical to SEQ ID NO: 362

SEQ ID NO: 6492 - DNA, 50 bp, Homo sapiens
tttcaacatggctagatccatcagaaactgaaggcggggagaaagctctc

SEQ ID NO: 6493 - DNA, 50 bp, Homo sapiens
ggtactcaaaggaaattactctttctctggaaccctggcagaaagtttta

SEQ ID NO: 6494 - DNA, 50 bp, Homo sapiens
atccttcctaccttttattatgaaagttttggtacctggcccggcgagcg

SEQ ID NO: 6495 - DNA, 50 bp, Homo sapiens
attaaggtttttaacatctactttgggtgatggagccttcaatgaagtca

SEQ ID NO: 6496 - DNA, 50 bp, Homo sapiens
gaaagactacgaatttcgctgggaggtaatagggaagccttccacataaa

SEQ ID NO: 6497 - DNA, 50 bp, Homo sapiens
aaatgaggtcagcaataaccttgattcggtcctccactggcaacatttta

SEQ ID NO: 6498 - DNA, 50 bp, Homo sapiens
cttctctccctgtaaccaggcagtgtgtgggcggggctcagaacatatct

SEQ ID NO: 6499 - DNA, 50 bp, Homo sapiens
gttgccctgatctggaaatcctgttgcttcttctgggatgaaggaacctc

SEQ ID NO: 6500 - DNA, 50 bp, Homo sapiens
taagataacccacaggcacttcctgtcataaagccaacgacacagaccag

SEQ ID NO: 6501 - DNA, 50 bp, Homo sapiens
atgggaacaggatgttaaatacacacatacatacgcacacaagcgttggg

SEQ ID NO: 6502 - DNA, 50 bp, Homo sapiens
cctctgctatcactagagaatgtagagaatggaaatggctgcctttatgc

SEQ ID NO: 6503 - DNA, 50 bp, Homo sapiens
gatacagatgtgattattcagcctcaaggggacttctccattgcgtaacg

SEQ ID NO: 6504 - DNA, 50 bp, Homo sapiens
ttattgttaccaattagaatcagcaattcaactgtgcggtgatttggcct

SEQ ID NO: 6505 - DNA, 50 bp, Homo sapiens
tcatcacttgggttaactaaaggtttgcgtatcacacaattacactacaa

SEQ ID NO: 6506 - DNA, 50 bp, Homo sapiens
ttcatagtcaaacaaaaggtaagatcatgcatatacccacggcaacaagg

SEQ ID NO: 6507 - DNA, 50 bp, Homo sapiens
cccacccccttcccctccatgtgaagatttgggtgcttaacatatcattt

SEQ ID NO: 6508 - DNA, 50 bp, Homo sapiens
gggagacatgctgattccactcaaagatctcataataaacagctttggcc

SEQ ID NO: 6509 - DNA, 50 bp, Homo sapiens
aaataaatttggaatgggacattgtgctgtttcaccttcaatgctgttaa

SEQ ID NO: 6510 - DNA, 50 bp, Homo sapiens
agaacagtcttgggttcaggggtgtgatgccagaatgtattttcgtacct

SEQ ID NO: 6511 - DNA, 50 bp, Homo sapiens
aaggcgaagtcaatcccatctccctgaacccaactgccagtaggtagttc

SEQ ID NO: 6512 - DNA, 50 bp, Homo sapiens
agttaaactgttggtgaggtagtgtgtcaggtactctgtatattagctct

SEQ ID NO: 6513 - DNA, 50 bp, Homo sapiens
actggataaacagaacggatcaaagataaaagtattcttgttgcctgggc

SEQ ID NO: 6514 - DNA, 50 bp, Homo sapiens
gtcccttaggggagggagagttgtcctctttgcccacagtctaccctcag

SEQ ID NO: 6515 - DNA, 50 bp, Homo sapiens
actggactactgaactttagaatactgtcctaaggaaataggtctgggca

SEQ ID NO: 6516 - DNA, 50 bp, Homo sapiens
caaacaacaaaagtggcctccatcgctgtgagcctctcaagggacagggc

SEQ ID NO: 6517 - DNA, 50 bp, Homo sapiens
aaggtggctggcttttatgatacagtggtggtaatgtagccctttttggt

SEQ ID NO: 6518 - DNA, 50 bp, Homo sapiens
tgctcaattgccatacatgcactataggccgggatagaaaatcgtcagct

SEQ ID NO: 6519 - DNA, 50 bp, Homo sapiens
ttcaaggatgtgactgatatctggtgtggtttattttgtttgttttgggg

SEQ ID NO: 6520 - DNA, 50 bp, Homo sapiens
agctttggaaatttgaacaaggtggggacaaaatcaggcaataacagact

SEQ ID NO: 6521 - DNA, 50 bp, Homo sapiens
cacttcctgagtgtttcctgagaacaaaggatcagagcttcggctgtgag

SEQ ID NO: 6522 - DNA, 50 bp, Homo sapiens
ttttccttttcgctgactttcccactcactgtctgtctctcattttctct

SEQ ID NO: 6523 - DNA, 50 bp, Homo sapiens
gcatgggaattggctgtcatcactcatagcacggtgtataaactcaagga

SEQ ID NO: 6524 - DNA, 50 bp, Homo sapiens
gtccactcaagttacctggctgtctatcttttggctgacccctgaagcga

SEQ ID NO: 6525 - DNA, 50 bp, Homo sapiens
ctaagtaagcaaagaggcagaggggaggaggggagtgtttggtactgtcc

SEQ ID NO: 6526 - DNA, 50 bp, Homo sapiens
tggtgcggtgttcatgattattatgcagggtggaagttcagtatttggtc

SEQ ID NO: 6527 - DNA, 50 bp, Homo sapiens
agcacatttgtgcagaaaggttttgcaggtatctgaggcactgctcacct

SEQ ID NO: 6528 - DNA, 50 bp, Homo sapiens
agaacaacacgggattgaagtgggaagagatgggaccctcattggatctg

SEQ ID NO: 6529 - DNA, 50 bp, Homo sapiens
ggaacaatagacctcttcactagctccctgctgtttgatggtttggttgg

SEQ ID NO: 6530 - DNA, 50 bp, Homo sapiens
agaggatgactttgaggtaaatgtttacgatgcacggttttaggcgatgt

SEQ ID NO: 6531 - DNA, 50 bp, Homo sapiens
gtgtcctggggagtgaggagaggtggagtagactctgagaggagtgaaaa

SEQ ID NO: 6532 - DNA, 50 bp, Homo sapiens
agatcatgtctggattgtgtttcctattacctagagacgaacacagatct

SEQ ID NO: 6533 - DNA, 50 bp, Homo sapiens
gtgtcccaggacgagcgggagtgcaccatggacctctccgagttcatgaa

SEQ ID NO: 6534 - DNA, 50 bp, Homo sapiens
tgtatggcttatagccagagatgaaacagaacccaagttaatattgccag

SEQ ID NO: 6535 - DNA, 50 bp, Homo sapiens
aggtttcagaatctgggccttacctttacaggttcaacaaaagaatggca

SEQ ID NO: 6536 - DNA, 50 bp, Homo sapiens
aagatgaggcgtagctcatgtacaaatgcagcattctcataagtgcttta

SEQ ID NO: 6537 - DNA, 50 bp, Homo sapiens
agatagtggtatttgggtgctgggcttgtctgaactgaggaggtgggtgc

SEQ ID NO: 6538 - DNA, 50 bp, Homo sapiens
ccttgcaccagagacgactgacatatatagatgggagtcactcatgcgct

SEQ ID NO: 6539 - DNA, 50 bp, Homo sapiens
ggtgtagcgtgaagatctggacagcgcactacgacccgggccactgtttc

SEQ ID NO: 6540 - DNA, 50 bp, Homo sapiens
agaagcaaacctgtgaagctactatcgtttatcatcagtgtgaatgcact

SEQ ID NO: 6541 - DNA, 50 bp, Homo sapiens
tagtgatacaatttggggtgccagaggttgggggtaaggaattttgaagc

SEQ ID NO: 6542 - DNA, 50 bp, Homo sapiens
gtgtggcctaaggaacacctcttgtggggagtaagagccagcccttcctc

SEQ ID NO: 6543 - DNA, 50 bp, Homo sapiens
agatgcgggcgcaagcttatgtcctgttatgagggtttaaattagattgg

SEQ ID NO: 6544 - DNA, 50 bp, Homo sapiens
tcataacgcccttcaaaacattgaataaaatcagtgcaaaacattgagca

SEQ ID NO: 6545 - DNA, 50 bp, Homo sapiens
tgagaaaggagttagcagaatattaacataccgagaagctgttgttagca

SEQ ID NO: 6546 - DNA, 50 bp, Homo sapiens
ctggagactcaggtcgcttaagtggaggggacgggcacagccattcctcc

SEQ ID NO: 6547 - DNA, 50 bp, Homo sapiens
aaagacctgccacttatttttggctctcatctgtactcttaagtgtgtgt

SEQ ID NO: 6548 - DNA, 50 bp, Homo sapiens
agacacagctgcagaaaacttattcttttcaagcatgcacagtcacaaaa

SEQ ID NO: 6549 - DNA, 50 bp, Homo sapiens
cattcaacaacacaaaccgagcacctactgtgtgccacgccacagacaag

SEQ ID NO: 6550 - DNA, 50 bp, Homo sapiens
cctaggaaacacaggtcaaagaaacacagtccaacatgtattcagaattc

SEQ ID NO: 6551 - DNA, 50 bp, Homo sapiens
aaacgcaatctattttaggtttgagattagaagctgaggccaaggactca

SEQ ID NO: 6552 - DNA, 50 bp, Homo sapiens
tcctccagatgcatggtccgtgaagaaatttaatagcaaagacgagaaga

SEQ ID NO: 6553 - DNA, 50 bp, Homo sapiens
ggctctcatgcttatgccacacatccttgattctgcttaggagtctctgg

SEQ ID NO: 6554 - DNA, 50 bp, Homo sapiens
aagcctgagctaacaagagctgaggacagtagcttattcctctttatggg

SEQ ID NO: 6555 - DNA, 50 bp, Homo sapiens
tggatgatgggattggataagcatgtggactggattgtgttacaaactct

SEQ ID NO: 6556 - DNA, 50 bp, Homo sapiens
tgctgtttctaggattaacacgaaatcatcactttgccatattttgagct

SEQ ID NO: 6557 - DNA, 50 bp, Homo sapiens
ggctcagcacaaaagagaattcgtagcactttcatgtgaaagcagaccca

SEQ ID NO: 6558 - DNA, 50 bp, Homo sapiens
gatattaaggtactttcagtacaaatctggtgctgtgagtgggctcatcc

SEQ ID NO: 6559 - DNA, 50 bp, Homo sapiens
tccagtttctcataaacaaattcttctatcctggcatttggatttgggtt

SEQ ID NO: 6560 - DNA, 50 bp, Homo sapiens
tcatggtcatagctgtaacctgtgtgaaatagtaatcagatcaaaaagcg

SEQ ID NO: 6561 - DNA, 50 bp, Homo sapiens
atatgtacctggagggcggacgatcgaaattactagtgaattagcggcag

SEQ ID NO: 6562 - DNA, 50 bp, Homo sapiens
tgcgagtgtaatttctgtaaggagggtatgggataattaatagcacgcct

SEQ ID NO: 6563 - DNA, 50 bp, Homo sapiens
gcccccagcattcaattcattttgtacccttagtttaaagaacttctccc

SEQ ID NO: 6564 - DNA, 50 bp, Homo sapiens
aactttgctttctgaaggttttggtgtacctcgggcgcgaacacgctaat

SEQ ID NO: 6565 - DNA, 50 bp, Homo sapiens
attgactccactttgtgccaagctctgcgggtaggcatatttcatatctt

SEQ ID NO: 6566 - DNA, 50 bp, Homo sapiens
cagtggagaagctgcactgtctccgggcttgtgtgatccgatctctgtac

SEQ ID NO: 6567 - DNA, 50 bp, Homo sapiens
agctttgaaagtaatgtctaaccctgctgtcagtttatcacaagtgcatt

SEQ ID NO: 6568 - DNA, 50 bp, Homo sapiens
agcttaattgaattggaggagcaccgaacaggcagtttcctgagcagtgg

SEQ ID NO: 6569 - DNA, 50 bp, Homo sapiens
gctctcactgatctctcttctctatctctttctgcagttataccagcact

SEQ ID NO: 6570 - DNA, 50 bp, Homo sapiens
tgagaagagctgtgaaggcagaggcggggcaagtgcaaaggtcctgactt

SEQ ID NO: 6571 - DNA, 50 bp, Homo sapiens
aactccctgttcagttcagttgctaatgatctcaagctcttccctgatta

SEQ ID NO: 6572 - DNA, 50 bp, Homo sapiens
cagcctaatgcctaaccacacagataccattggtgggcgacgtgacccag

SEQ ID NO: 6573 - DNA, 50 bp, Homo sapiens
caccatcttttgctcggatactagcccgcaatacccactcacctaccacc

SEQ ID NO: 6574 - DNA, 50 bp, Homo sapiens
agggtctccaccttacagaagtacatgaacaaccagagatagcagggctg

SEQ ID NO: 6575 - DNA, 50 bp, Homo sapiens
accaggaaaagtaaaaatcatagttggtgtctctcgggtttctcaccttc

SEQ ID NO: 6576 - DNA, 50 bp, Homo sapiens
atgtatgagagagattcgagatgagttaaaggagggaagggaggggtggt

SEQ ID NO: 6577 - DNA, 50 bp, Homo sapiens
catgagtattggcactggggttcaagttccagggcagagcaggataagag

SEQ ID NO: 6578 - DNA, 50 bp, Homo sapiens
ctcctggggctggagtcctggtctgccttctggggacagagattaggtcg

SEQ ID NO: 6579 - DNA, 50 bp, Homo sapiens
tggaacttcagtcaaaaacatctgtactttgtacaggacaaagatttggc

SEQ ID NO: 6580 - DNA, 50 bp, Homo sapiens
atagaacttgttttacctatgagccttgccttgtatttattcactgtggc

SEQ ID NO: 6581 - DNA, 50 bp, Homo sapiens
acatctcttgtgaaagttcaaatgttacagcaaggtgtaaacactccact

SEQ ID NO: 6582 - DNA, 50 bp, Homo sapiens
gggtgaattaatcgggagatgggtagtcagggcaaatgatgggtgggttt

SEQ ID NO: 6583 - DNA, 50 bp, Homo sapiens
tgcaattgtggagacaaattgttagagtttaaatcctggctctgttccct

SEQ ID NO: 6584 - DNA, 50 bp, Homo sapiens
ggacctatgtcctcaagacatggaaactactagttctgtcgtgccaggag

SEQ ID NO: 6585 - DNA, 50 bp, Homo sapiens
aattaaggatgccctaccgacatctatcagcatacctggaacaggttcga

SEQ ID NO: 6586 - DNA, 50 bp, Homo sapiens
cggccaacccaggagggcaggtgttttgggcatctggtttatagtacctc

SEQ ID NO: 6587 - DNA, 50 bp, Homo sapiens
gctggggtgaaaacttgaagactcagacctcagtggaaacagatgaatgt

SEQ ID NO: 6588 - DNA, 50 bp, Homo sapiens
ccccaggctctgtgacgcttgaaattctaattagcgcagaaaagggctaa

SEQ ID NO: 6589 - DNA, 50 bp, Homo sapiens
cctgactacgtgttttccccacagacatcacactggttcacctcgttgaa

SEQ ID NO: 6590 - DNA, 53 bp, Homo sapiens
aatggaaagacacttctgtatacactggaaatctcaggaaatttcttttttcc

SEQ ID NO: 6591 - DNA, 50 bp, Homo sapiens
gacagtacagtaccctaagagcactgaggagggccaccccacgtgaactc

SEQ ID NO: 6592 - DNA, 50 bp, Homo sapiens
tttccttggagatttcaggcatcttaggccggaagggacctcgaaggtgg

SEQ ID NO: 6593 - DNA, 50 bp, Homo sapiens
ctccgcttctttcactcattcgtttagtgtttctttaagctttgccttgt

SEQ ID NO: 6594 - DNA, 50 bp, Homo sapiens
tccacattttgatcatgcatttatgaaagccctgggtttgttattgagaa

SEQ ID NO: 6595 - DNA, 50 bp, Homo sapiens
gctatcttctgctgaatcagcgtaatgctgatatacaccctattttctgt

SEQ ID NO: 6596 - DNA, 50 bp, Homo sapiens
aaaagaaaagtttttcaacccagggaatttatagtgggtgtcagtcgaga

SEQ ID NO: 6597 - DNA, 50 bp, Homo sapiens
aggagacgatgtagggggaagtgtgttagattgtaatggaggggtttgga

SEQ ID NO: 6598 - DNA, 50 bp, Homo sapiens
gctctttcccagacccagccgccaggttctctgtagaagaaaataaatgc

SEQ ID NO: 6599 - DNA, 50 bp, Homo sapiens
aaggaggaatgggaatctcaagctcaagggcactctcactaattgtgggt

SEQ ID NO: 6600 - DNA, 50 bp, Homo sapiens
aaatagccaccttctccccattttctgtcagaacacacactttatatcca

SEQ ID NO: 6601 - DNA, 50 bp, Homo sapiens
tttggtaaaagagattggaggggacaccagggaaaccaggattttctggc

SEQ ID NO: 6602 - DNA, 50 bp, Homo sapiens
aagtgctaaggcattctctaaactatctttccagctccgggcgacaatgg

SEQ ID NO: 6603 - DNA, 50 bp, Homo sapiens
ccactctctaagtcaagcgagtccttcctgcatacctgtactgggtgctg

SEQ ID NO: 6604 - DNA, 50 bp, Homo sapiens
ggactttgcaggcttcattccctgtctgtgtcttttccttctggtgtgtt

SEQ ID NO: 6605 - DNA, 50 bp, Homo sapiens
atttgctggccaatcctgctgactatgaatctttgggggcactgagttac

SEQ ID NO: 6606 - DNA, 50 bp, Homo sapiens
ctggggtactggggaaaaggaactggtattgagattttatatttggggcg

SEQ ID NO: 6607 - DNA, 50 bp, Homo sapiens
ttgagtaaggctcagagttgcagatgaggtgcagagaacatcctgtgact

SEQ ID NO: 6608 - DNA, 50 bp, Homo sapiens
ggtcacagagagaaatggtagctgaagaagcagggcacgagggctctaac

SEQ ID NO: 6609 - DNA, 50 bp, Homo sapiens
tttccggtatattcgtgtgggttgactttttgtgtgtgtggttgtggtgg

SEQ ID NO: 6610 - DNA, 50 bp, Homo sapiens
ggatctcttgctcctctcacctgtgtgacagactactaacagcccaactg

SEQ ID NO: 6611 - DNA, 50 bp, Homo sapiens
acagtgtgggacagaagagtgctcagtgattaaatgcctgataatagatt

SEQ ID NO: 6612 - DNA, 50 bp, Homo sapiens
ctctctcgcaatttacaaccgctttcagtaccattcaccgtcactcctct

SEQ ID NO: 6613 - DNA, 50 bp, Homo sapiens
ctttggggagtggagttgttgtagatggggagagaatcagaacaaggaga

SEQ ID NO: 6614 - DNA, 50 bp, Homo sapiens
ccttactgcttacggtcatcggtcatcagcccaacccgcttggttaggtg

SEQ ID NO: 6615 - DNA, 50 bp, Homo sapiens
agagtataatttccccagtgtggagtggttagtgttgctaaagaagaggt

SEQ ID NO: 6616 - DNA, 50 bp, Homo sapiens
ctgatgtcgtgtctgcactcacctggtcatgtgttctgttgtgcggtagt

SEQ ID NO: 6617 - DNA, 50 bp, Homo sapiens
aggggcagagaagaatccacactcacaagagatgaccaggagtaaaactg

SEQ ID NO: 6618 - DNA, 50 bp, Homo sapiens
cccagcagaggccaacaagcagccatacccaaacttcagccaaaataaaa

SEQ ID NO: 6619 - DNA, 50 bp, Homo sapiens
tgtgcaaatacggcgagaagaagtgcatgagaaagtgctttataagctgt

SEQ ID NO: 6620 - DNA, 50 bp, Homo sapiens
ccagcttttcctttgatgttagttagcagtaagtcacaggtttgagcccc

SEQ ID NO: 6621 - DNA, 50 bp, Homo sapiens
ggcacgcatcctcattcctgcatgctcttagaatatctatcaatgatcat

SEQ ID NO: 6622 - DNA, 50 bp, Homo sapiens
acttctatactcagtgcgctgtgggtaaccaagcaagcaggtttgttgtc

SEQ ID NO: 6623 - DNA, 50 bp, Homo sapiens
gcgggatggtgggaagacagacactgccttagagcatgaataattgaaga

SEQ ID NO: 6624 - DNA, 52 bp, Homo sapiens
aggtagactatttagctggaagcatccaaacaggggattttaaaaatactca

SEQ ID NO: 6625 - DNA, 52 bp, Homo sapiens
aaaatgtaggttaaaactctcacttaagaaggagaagatctgagtaaaccca

SEQ ID NO: 6626 - DNA, 50 bp, Homo sapiens
acctgaacaatgaatgaagaaaggaagacttggttcttctagctctggac

SEQ ID NO: 6627 - DNA, 50 bp, Homo sapiens
catggctcacaagctctaacactcccctccctccagatcctaagaagaag

SEQ ID NO: 6628 - DNA, 50 bp, Homo sapiens
tctgagcttcacttcaagaactggtagtccaaaagaactggttcgttcag

SEQ ID NO: 6629 - DNA, 50 bp, Homo sapiens
acttcactcactttttagcctgttcatatgagcttgtcagtgcttttgtt

SEQ ID NO: 6630 - DNA, 50 bp, Homo sapiens
tgaggaggatgggaggcgcacaggcaatttagctagatatagaaagagaa

SEQ ID NO: 6631 - DNA, 50 bp, Homo sapiens
agctgatttggattcttgcggtttgcatcggtctaatttatcaagtgtgt

SEQ ID NO: 6632 - DNA, 50 bp, Homo sapiens
tccatccttggaagcttgacaagcattcacactactggctcacctactat

SEQ ID NO: 6633 - DNA, 50 bp, Homo sapiens
tagcactgtagccagagtccctgcttgtaccaggaagctgggtggtggtt

SEQ ID NO: 6634 - DNA, 50 bp, Homo sapiens
tggatagtcagaattacgtgttttgtggattggggagggaggggaggaaa

SEQ ID NO: 6635 - DNA, 50 bp, Homo sapiens
gcactcctggaaccttctcactaattcggggaccagttttgtgaatgttg

SEQ ID NO: 6636 - DNA, 50 bp, Homo sapiens
ttgctgcggatgacctgactgagccctgggagactgtgctataatctctc

SEQ ID NO: 6637 - DNA, 50 bp, Homo sapiens
agaaggaggatctgttctaaacatctgcgaggggaggacaaagcattgaa

SEQ ID NO: 6638 - DNA, 50 bp, Homo sapiens
cttgcatctgagtgaagatgaacctttctttcccagccctgagagaggga

SEQ ID NO: 6639 - DNA, 50 bp, Homo sapiens
gtctagctggcaggtgatggatgaatggatgagctggcagaccaacagaa

SEQ ID NO: 6640 - DNA, 50 bp, Homo sapiens
tgcatggaaatgtttcgagtacggggaaaataagggagccaaaactgtgt

SEQ ID NO: 6641 - DNA, 50 bp, Homo sapiens
ttttaaggtgtgactcaatttacaggcattctgtatttttgcgatttggt

SEQ ID NO: 6642 - DNA, 50 bp, Homo sapiens
acctttgggagaaagtcttacaactacatgaaatgcagatttatggactc

SEQ ID NO: 6643 - DNA, 50 bp, Homo sapiens
gaagggacagaacaatcaactgtgagagatgggaagaaaactcaaatgga

SEQ ID NO: 6644 - DNA, 50 bp, Homo sapiens
ctagtttggggactttcattgggcacgtgaatccaggagggctgaatttt

SEQ ID NO: 6645 - DNA, 50 bp, Homo sapiens
ggcccagattgtagacagcataaaaataattttgggcttttcctgttaaa

SEQ ID NO: 6646 - DNA, 50 bp, Homo sapiens
ctgggcttcttgtgtgagaagcaccgcagccaagaacaaccagtgcaact

SEQ ID NO: 6647 - DNA, 50 bp, Homo sapiens
gaagggggattcggtgatgggggaagccaagggacaagggaaaaaggaaa

SEQ ID NO: 6648 - DNA, 50 bp, Homo sapiens
aacccaaccatgaaaaagaagaagctctggactacggccaggcgtgggag

SEQ ID NO: 6649 - DNA, 50 bp, Homo sapiens
tggctatttgagttttctcttacatgaaatgcctggcaacgtacactggc

SEQ ID NO: 6650 - DNA, 50 bp, Homo sapiens
tgaactctgatttccgccgaaactaggaggaaacacccaaaagaagacgg

SEQ ID NO: 6651 - DNA, 50 bp, Homo sapiens
tttgctgggactaaaatcaaaactgcactgcagagcaggtgagggttcat

SEQ ID NO: 6652 - DNA, 58 bp, Homo sapiens
tggagagtgtgtgtattaccatttttttacattgcatcacattttaccatctatatct

SEQ ID NO: 6653 - DNA, 50 bp, Homo sapiens
tttgaagcccctcatagagaagagactgtaccataagagaagcccactca

SEQ ID NO: 6654 - DNA, 50 bp, Homo sapiens
aactctcagtccatgagcttgattactccattgtaccatttggaagccca

SEQ ID NO: 6655 - DNA, 50 bp, Homo sapiens
gtgggtagccattaagtggtctggcacagaaagggacaagtagcttcaag

SEQ ID NO: 6656 - DNA, 50 bp, Homo sapiens
ctggtgctgagtggagtcacagtaaggctgtagatggagcgccctgggaa

SEQ ID NO: 6657 - DNA, 50 bp, Homo sapiens
ttttgatgtgaccagtcgtgcatggcgggggacaggagcttagggggaat

SEQ ID NO: 6658 - DNA, 50 bp, Homo sapiens
attatgcatgtcgaggggacaacttttattaaacaggaggggtgtgtctt

SEQ ID NO: 6659 - DNA, 50 bp, Homo sapiens
tggtcatgtttccctctttactccacgacagtttcattattgtaaccagg

SEQ ID NO: 6660 - DNA, 50 bp, Homo sapiens
ttctgttggttatatgaatggcagttattgtctcccagtgtgtgggttct

SEQ ID NO: 6661 - DNA, 50 bp, Homo sapiens
agtcctggcaactttacctgggaattgtctgtaatctttaagcagtggcg

SEQ ID NO: 6662 - DNA, 50 bp, Homo sapiens
aggacttatctagctttcacagattcagagtgcgtttcaaacatcattgt

SEQ ID NO: 6663 - DNA, 50 bp, Homo sapiens
tttaacaggcttatctaggacataggcccaagagggaggaggaggaaggc

SEQ ID NO: 6664 - DNA, 50 bp, Homo sapiens
ctccaggccgaacgagcctccactctggattaagatctgtcatcttgaca

SEQ ID NO: 6665 - DNA, 50 bp, Homo sapiens
gcaggacttgtggcaggactcaacgggagagaaagaggctgaaacataaa

SEQ ID NO: 6666 - DNA, 50 bp, Homo sapiens
aagaacatcccaacttttccggtaggcaagtgtcaagtcacctggacaat

SEQ ID NO: 6667 - DNA, 50 bp, Homo sapiens
tctgtggcttgttgtgggaccctgcgccctttaaattagggcatatttta

SEQ ID NO: 6668 - DNA, 50 bp, Homo sapiens
gcgctaaaaacctggtgattaaatgacaaacagaacgtgagaagagattt

SEQ ID NO: 6669 - DNA, 50 bp, Homo sapiens
tcctgcacacaacaaataaagacaagaataaagggccacccatcagtagc

SEQ ID NO: 6670 - DNA, 50 bp, Homo sapiens
atgttgttcaaattaaacatcataccacatgggggcagctaccaattttt

SEQ ID NO: 6671 - DNA, 50 bp, Homo sapiens
taatatgaaaagctggaaaagaattaaggggttgaggagacgtgccgggt

SEQ ID NO: 6672 - DNA, 50 bp, Homo sapiens
gttaccctgacgaatgcagtcctcgtgtggaatgtctatgccctcttgag

SEQ ID NO: 6673 - DNA, 50 bp, Homo sapiens
acaccagcagtcataggggaaaggggaatacagttaattgggtatttgtt

SEQ ID NO: 6674 - DNA, 50 bp, Homo sapiens
actccctcccatctctggtctttagttggaagcaagctttcggacaacgg

SEQ ID NO: 6675 - DNA, 50 bp, Homo sapiens
tccaacaagggttacggcagaatttatgcgaaagtcttctttgggctaaa

SEQ ID NO: 6676 - DNA, 50 bp, Homo sapiens
ttgttctgctcaggccaaggattgttgtgtgctctgtatttgctgctttg

SEQ ID NO: 6677 - DNA, 50 bp, Homo sapiens
ggcccggcatgtcttcgttttgtcagtcctcatccaatccatcttcatat

SEQ ID NO: 6678 - DNA, 50 bp, Homo sapiens
gtgggtttttagacacctgcagcaagaagaaatactgactgactaggcat

SEQ ID NO: 6679 - DNA, 50 bp, Homo sapiens
ttttaaagaaaaatctattatcttggagcatggatgggggaatgcgaagg

SEQ ID NO: 6680 - DNA, 50 bp, Homo sapiens
cagaagaaacatggcaaactgctctgtgctttcaaaccaaagtgttcccc

SEQ ID NO: 6681 - DNA, 50 bp, Homo sapiens
gttacttaagatcagtatgtgtggtgcatatgtgatttcgaccattcagt

SEQ ID NO: 6682 - DNA, 50 bp, Homo sapiens
gagaatttccgtctgatctatgacaccaagggtcgctttgctgtacctcg

SEQ ID NO: 6683 - DNA, 50 bp, Homo sapiens
ctgggttaatactcaccaactttgagaaggttggtctctgctcttctgta

SEQ ID NO: 6684 - DNA, 50 bp, Homo sapiens
ggaaagacaggtgagtgtgccacaactacctaacacatcagcaaatctgg

SEQ ID NO: 6685 - DNA, 50 bp, Homo sapiens; identical to SEQ ID NO: 378

SEQ ID NO: 6686 - DNA, 50 bp, Homo sapiens
cgataagctgtggtgttgggagtgagagatgttactttgcgaatgttcaa

SEQ ID NO: 6687 - DNA, 50 bp, Homo sapiens
aaaggctaggtttgcgaaagcccttctaaaactatgctttggtggttact

SEQ ID NO: 6688 - DNA, 50 bp, Homo sapiens
ctgaccctgccgggcggaagataaaacaaaaacgagaagaacaagcaaga

SEQ ID NO: 6689 - DNA, 50 bp, Homo sapiens
aagattgtaaaaatacattttaggctcaagagttccaggggtttcagagc

SEQ ID NO: 6690 - DNA, 50 bp, Homo sapiens
tgcaagctggcaccttcacgtttatttttaaagggcttcacatcaaagat

SEQ ID NO: 6691 - DNA, 50 bp, Homo sapiens
aaacaaagaaggaaaatgaagagggggaaaagatgaacatcaggctgggt

SEQ ID NO: 6692 - DNA, 50 bp, Homo sapiens
tccaaaggatgttctggtgttgcagcatgatttctggtgttagtctttct

SEQ ID NO: 6693 - DNA, 50 bp, Homo sapiens
tttgtgggtgcgtgagaggggatttatactccttgagccatattttgtga

SEQ ID NO: 6694 - DNA, 50 bp, Homo sapiens
gggttcacagcatgggtggaggtaagtagtattctcattggttggttagt

SEQ ID NO: 6695 - DNA, 50 bp, Homo sapiens
gacagtgagaagaatatggagtagagtccttttggtctttgaggcggtca

SEQ ID NO: 6696 - DNA, 50 bp, Homo sapiens
aacagctgaagaacaagaaggtgagctctgaatgcgtcaggtggtcattc

SEQ ID NO: 6697 - DNA, 50 bp, Homo sapiens
ggctgaccagtacaggcttgggaattttatggttgggtggtttctaccaa

SEQ ID NO: 6698 - DNA, 50 bp, Homo sapiens
gggggagctatattactgattaaaaccaccatttcttcacccaacttatg

SEQ ID NO: 6699 - DNA, 50 bp, Homo sapiens
aagtcttgtattatgaggtactggggctctgggggatattgagatgagaa

SEQ ID NO: 6700 - DNA, 50 bp, Homo sapiens; identical to SEQ ID NO: 382

SEQ ID NO: 6701 - DNA, 50 bp, Homo sapiens
ggagcttccagtctaatagaaaagatgcacttacgaatagactttgggta

SEQ ID NO: 6702 - DNA, 50 bp, Homo sapiens
tctgtgctctgtggacccgtcaccctgagctcctcagttgctgaaccatc

SEQ ID NO: 6703 - DNA, 50 bp, Homo sapiens
tgctggcatgtggatagactttagcaaatggtagtcatcttctaatttct

SEQ ID NO: 6704 - DNA, 50 bp, Homo sapiens
aatgggaatcttaaggcctctctggaaagggtgtgagggggtcgaggggg

SEQ ID NO: 6705 - DNA, 50 bp, Homo sapiens
tgcatattgtcactgactggctagggtctctaaatttatgaaaccttaca

SEQ ID NO: 6706 - DNA, 52 bp, Homo sapiens
gtcagcaactaaaaagggagatatatcttagagagactggaataagcaactc

SEQ ID NO: 6707 - DNA, 50 bp, Homo sapiens
ggaaggactcaaactggccataaaggcaatacggcatgttcattacacca

SEQ ID NO: 6708 - DNA, 50 bp, Homo sapiens
tttgttgactatgaaatagtggtcctggttttaactctttggggttccct

SEQ ID NO: 6709 - DNA, 50 bp, Homo sapiens
aattatattttaggctgatgtgggtggtctgtaatgctctcatttaccac

SEQ ID NO: 6710 - DNA, 50 bp, Homo sapiens
ctgtgtttctgtatggtattgcatttgtcccggcctgttgggtttggtgg

SEQ ID NO: 6711 - DNA, 50 bp, Homo sapiens
ttcatgctcattaggacattgaacaaatggcagagtaagaaagtttggcc

SEQ ID NO: 6712 - DNA, 50 bp, Homo sapiens
gggaatggactcatatgcaagattgctgacttcggattggcccgattgat

SEQ ID NO: 6713 - DNA, 50 bp, Homo sapiens
caacacatgggacgggaaggaaatccttccgtgtgattttgttaaaaata

SEQ ID NO: 6714 - DNA, 50 bp, Homo sapiens
cagccacctcctcaggtcagacaagcccagcacccaaataccactatctg

SEQ ID NO: 6715 - DNA, 50 bp, Homo sapiens
ggcttccctattacctcccagcgaaattcgtagtctttctctatggagtt

SEQ ID NO: 6716 - DNA, 50 bp, Homo sapiens
tgctgatgtgttaggtagttgtggcacactcacctgtctttcctaaatgc

SEQ ID NO: 6717 - DNA, 50 bp, Homo sapiens
ttcatgctcagcaaaacaacgttttaggatggtgagagaagacaaagtaa

SEQ ID NO: 6718 - DNA, 50 bp, Homo sapiens
tattaaccactcacgggagctctccatgcatttggtattttcgtctgggg

SEQ ID NO: 6719 - DNA, 50 bp, Homo sapiens
ttacctgctttgcatgctctccatcgtcaaagtcttctggaaacttaggc

SEQ ID NO: 6720 - DNA, 50 bp, Homo sapiens
ccccaccccaacacatacaaacgtttcccaccaatccttgaactgcaaaa

SEQ ID NO: 6721 - DNA, 50 bp, Homo sapiens
ttcaaggtcccaatacccaactaactcgaaggaagaaatggaaatctatt

SEQ ID NO: 6722 - DNA, 50 bp, Homo sapiens
tgcacagaactcttacttacatgtctcatcgaaactccagaacaccgtcg

SEQ ID NO: 6723 - DNA, 50 bp, Homo sapiens
tgcatgtatcccggtaattcaaatccaatttcacagccactgctgaatat

SEQ ID NO: 6724 - DNA, 50 bp, Homo sapiens
tacaggaaaatgaaactagacgggtgggggacactagaatgaaaaccagt

SEQ ID NO: 6725 - DNA, 50 bp, Homo sapiens
agtttctgctttcagtgactgaggctttgctttaacctggtgactcccaa

SEQ ID NO: 6726 - DNA, 50 bp, Homo sapiens
tcccacttcaagttaagcaccaaagcaatcactaattctggagcacagga

SEQ ID NO: 6727 - DNA, 50 bp, Homo sapiens
catggatgggggcagtggtgtttctagtgtgtgaggaagcagagcagatg

SEQ ID NO: 6728 - DNA, 50 bp, Homo sapiens
tcaccacagatgggaagatcgtttcctgaaaacagtctataaatcacaga

SEQ ID NO: 6729 - DNA, 50 bp, Homo sapiens
cagacgctccagtgctgccgaggttagtgtgtttattagacctgaaatga

SEQ ID NO: 6730 - DNA, 50 bp, Homo sapiens
ccctttaggcctcttgcccgaacagtgaacactaatagatatcctaagct

SEQ ID NO: 6731 - DNA, 50 bp, Homo sapiens
atggggatcatgttttatttttctctatataatgggccagtgtgttccca

SEQ ID NO: 6732 - DNA, 50 bp, Homo sapiens
agctgtagaccataagccaccttcaggtagtggtttgggaaatcaagcaa

SEQ ID NO: 6733 - DNA, 50 bp, Homo sapiens
tgtacttatgcttgtcttctctacctgcccccagtcttgaagtggtggaa

SEQ ID NO: 6734 - DNA, 50 bp, Homo sapiens
ggagggtgtgggaagcaagagaagaacattctgttaggggcagagaagaa

SEQ ID NO: 6735 - DNA, 50 bp, Homo sapiens
gcatctccagctttcatagttacccaacttgtaaaccagaagatgtgctg

SEQ ID NO: 6736 - DNA, 50 bp, Homo sapiens
ggccagtgccagacggtagctagttggatgctaaaggtagaatttagata

SEQ ID NO: 6737 - DNA, 50 bp, Homo sapiens
ggcattgtaggttgacaccagcaaagactcagagtgacttgagcattgga

SEQ ID NO: 6738 - DNA, 50 bp, Homo sapiens
agcccatttggatatggcccatctttacctaatggctactatagtgaggt

SEQ ID NO: 6739 - DNA, 50 bp, Homo sapiens; identical to SEQ ID NO: 4953

SEQ ID NO: 6740 - DNA, 50 bp, Homo sapiens
aatggtcaggcacaggtagaatcaaagtcctgtatgtatgttcacacaga

SEQ ID NO: 6741 - DNA, 50 bp, Homo sapiens
tacctgaaggtgtagagagtgcccgcatccagcaaggccaacagctccac

SEQ ID NO: 6742 - DNA, 50 bp, Homo sapiens
ctgtgtttttcccaaagcaacaatttcaaacaaagtgagagccactgaca

SEQ ID NO: 6743 - DNA, 50 bp, Homo sapiens
gactccgagctcaagtcagtctgtacccccaacccctaacccactgcatc

SEQ ID NO: 6744 - DNA, 50 bp, Homo sapiens
tgtaactgactttatgtatcactcaagtcttgcctttactgagtgcctga

SEQ ID NO: 6745 - DNA, 50 bp, Homo sapiens
tctctctaaccaaaactgtaatcttcaggaccagcaaactcagcccaagg

SEQ ID NO: 6746 - DNA, 50 bp, Homo sapiens
aactcttggttaaatgggttaatagaggattggaacactttgtttgctgt

SEQ ID NO: 6747 - DNA, 50 bp, Homo sapiens; identical to SEQ ID NO: 6540

SEQ ID NO: 6748 - DNA, 50 bp, Homo sapiens
ggactaacttccacctcctctgctacttccagctgcttctaatcacactt

SEQ ID NO: 6749 - DNA, 50 bp, Homo sapiens
agtcttccacccagcataggtatcacacaaccagctctgttttactcctg

SEQ ID NO: 6750 - DNA, 50 bp, Homo sapiens
ttagctggtacattgttcagagtttactgggagccggtaagatagtcacc

SEQ ID NO: 6751 - DNA, 50 bp, Homo sapiens
agcgtgatgcttcctcatgtcggtgattttctgttgagacatcttcaagc

SEQ ID NO: 6752 - DNA, 56 bp, Homo sapiens
cagggttaacaaaagtatggaattcaattctttttatatgctgcagccatgttcct

SEQ ID NO: 6753 - DNA, 50 bp, Homo sapiens
tgtaattgatttccgcataaacggtcattactggcacctatggcagcacc

SEQ ID NO: 6754 - DNA, 50 bp, Homo sapiens
gtgatccacttggagctgctactggtcccattgagtcctatagtacttca

SEQ ID NO: 6755 - DNA, 50 bp, Homo sapiens
tgccatgaaatctctattaattctcagaaagatcaaaggaggtcccgtgt

SEQ ID NO: 6756 - DNA, 50 bp, Homo sapiens
cccacctggcaaatcctcaagtgtgaccctagtcatctttctccttttgg

SEQ ID NO: 6757 - DNA, 50 bp, Homo sapiens
gctaaacagaaaagaacctgaagtacagttcccgtcttcaaagaagatgc

SEQ ID NO: 6758 - DNA, 50 bp, Homo sapiens
atcctcctcccctgggatggcatagaagagactttaaaaccaaatgagcc

SEQ ID NO: 6759 - DNA, 50 bp, Homo sapiens
gtcagtaagctctgcctgccaagaagacacagtgagaggtgtccacagtc

SEQ ID NO: 6760 - DNA, 50 bp, Homo sapiens
gtttccacttagttacttcttcctacctgctgtgaagctctgcaccctgc

SEQ ID NO: 6761 - DNA, 50 bp, Homo sapiens
agagtaatccacatcccagggacagtcacaatgacctacggctttagctg

SEQ ID NO: 6762 - DNA, 50 bp, Homo sapiens
gcagggctacaccaagtccattgatatttggtctgtaggctgcattctgg

SEQ ID NO: 6763 - DNA, 50 bp, Homo sapiens
tcttctctaaaatgccctcctctccttcctttttccagacctggtttaaa

SEQ ID NO: 6764 - DNA, 50 bp, Homo sapiens
tcgccatttggtagttccacagtgactgctcttctattttacgaagccac

SEQ ID NO: 6765 - DNA, 50 bp, Homo sapiens
gtagattactatgagaccagcagcctctgctcccagccagctgtggtgtg

SEQ ID NO: 6766 - DNA, 50 bp, Homo sapiens
tttccttttcgctgactttctcactcactgtctgtctctcattttctcca

SEQ ID NO: 6767 - DNA, 50 bp, Homo sapiens
tggtaagtttctggcagtgtggagacaggggaataatctcaacagtaggt

SEQ ID NO: 6768 - DNA, 50 bp, Homo sapiens
ccatggtggtgcttgactttgctttggggcttaatcctagtatcatttgg

SEQ ID NO: 6769 - DNA, 50 bp, Homo sapiens
tcagtgggtgttggttgtccattagttgagacttagttgttgctctggga

SEQ ID NO: 6770 - DNA, 50 bp, Homo sapiens
ggctggacagcagatgattcaaatctcaatactacatgcccattctgtgg

SEQ ID NO: 6771 - DNA, 50 bp, Homo sapiens
caggatggaacaagactccagcccctgcctgtctcatgtatctgcaaggg

SEQ ID NO: 6772 - DNA, 50 bp, Homo sapiens
cttcagtgcgtacacgagctcaacgttagtgccaggaaagacaactactc

SEQ ID NO: 6773 - DNA, 50 bp, Homo sapiens
actcgtatgccaactcttctgtcttcactactagagtgtagattggactc

SEQ ID NO: 6774 - DNA, 50 bp, Homo sapiens
tggactggaacttgactcgaagttatgtggcttaatgagtaagttcagcc

SEQ ID NO: 6775 - DNA, 50 bp, Homo sapiens
actggttcatttgtttcccgatagagctttattggaggaggcttgagagc

SEQ ID NO: 6776 - DNA, 50 bp, Homo sapiens
accatctcctttaatcctcacagtgatcctggagcaatgtgtgcattcct

SEQ ID NO: 6777 - DNA, 50 bp, Homo sapiens
catcacctgctcacctaggaaccaggagtactgggaactgttccgttact

SEQ ID NO: 6778 - DNA, 50 bp, Homo sapiens
tcattgctgatgatcttgaggctgttgtcgaacttctcatggttcacacc

SEQ ID NO: 6779 - DNA, 50 bp, Homo sapiens
tggcaccacgctgattattttccttttcaaatcccagcctatacacctcc

SEQ ID NO: 6780 - DNA, 50 bp, Homo sapiens; identical to SEQ ID NO: 327

SEQ ID NO: 6781 - DNA, 50 bp, Homo sapiens
aggcctttttatttgtctgtttagatacactgcttcctatatctgctgga

SEQ ID NO: 6782 - DNA, 50 bp, Homo sapiens
cccgtgccccaccagtctcactgcctgactccaagtctcgtacactagat

SEQ ID NO: 6783 - DNA, 50 bp, Homo sapiens
agcgatgaactgttgcaaaagaattttccagagcattttccattaaacca

SEQ ID NO: 6784 - DNA, 50 bp, Homo sapiens
ccatattcttgttccccagccaggtgctgcacctccccactcttttagtg

SEQ ID NO: 6785 - DNA, 50 bp, Homo sapiens
aaatgcttaaaggaacaatatatgtccctttcgaggcacgtgattcgttt

SEQ ID NO: 6786 - DNA, 50 bp, Homo sapiens
tctggagccacacccttaccatcaccttccaaagaagaaattgaaccctt

SEQ ID NO: 6787 - DNA, 50 bp, Homo sapiens
aatcacacaaggtcgaaagtagacagtcctcttggacttggaattgtcca

SEQ ID NO: 6788 - DNA, 50 bp, Homo sapiens
actttcctccgggaagtttgtatcttagcgtggacaacaggttaacacaa

SEQ ID NO: 6789 - DNA, 50 bp, Homo sapiens
tcaggatgctctcactttaagaaccgggcaaataatagaacactgtgaca

SEQ ID NO: 6790 - DNA, 50 bp, Homo sapiens
acttcactcagagtaaatgaaaagactgggtgcctcatcaatatcattgt

SEQ ID NO: 6791 - DNA, 50 bp, Homo sapiens
tgactgaaggcaagctcacagatgaagcagaggactgaagatctcgatct

SEQ ID NO: 6792 - DNA, 50 bp, Homo sapiens
gctgagaaggatgtggtataaatgtattaagcagcttagggtctctggcc

SEQ ID NO: 6793 - DNA, 50 bp, Homo sapiens
aagtccccgtctagtgggaaagaaagaagttgaacaagtaattccaaggg

SEQ ID NO: 6794 - DNA, 50 bp, Homo sapiens
cgcccggcaagtactggggtttcttatagcttctctctgcatctacaaag

SEQ ID NO: 6795 - DNA, 54 bp, Homo sapiens
ctgtttctctattttaacttacattggttattctgtaaagtcagatgtggcagt

SEQ ID NO: 6796 - DNA, 50 bp, Homo sapiens
gcactgtccttcccagttctacatttgagtctgagttgactcgcaagact

SEQ ID NO: 6797 - DNA, 50 bp, Homo sapiens
aacagattgtgcttctgttctgaatcttctaaagccatctgcacagtgct

SEQ ID NO: 6798 - DNA, 50 bp, Homo sapiens
aacagattgtgcttctgttctgaatcttccaaagccatctgcacagtgct

SEQ ID NO: 6799 - DNA, 50 bp, Homo sapiens
atctgcacagtgttagcatggtgactccagtgtcctccaagactccatag

SEQ ID NO: 6800 - DNA, 50 bp, Homo sapiens
tttagcatccactagttactgtctggcactggccacgaagggtgacaggg

SEQ ID NO: 6801 - DNA, 50 bp, Homo sapiens
gaatcccggtcatctctacccaagtcccggtctctctaccctattctctc

SEQ ID NO: 6802 - DNA, 50 bp, Homo sapiens
tggtaacttcaaagtccctaacacattcgatatttctcctagcttccact

SEQ ID NO: 6803 - DNA, 50 bp, Homo sapiens
actcccaccaaaccccactttgtaatcactggtagtaaagagagatgcag

SEQ ID NO: 6804 - DNA, 50 bp, Homo sapiens
aagagtaagaggcaacagatagagtgtccttggtaataagaagtcagaga

SEQ ID NO: 6805 - DNA, 50 bp, Homo sapiens
gaaattggaaggtgatacttggggaccacaacacgcacatctgggaactg

SEQ ID NO: 6806 - DNA, 50 bp, Homo sapiens
tcatctgtggcatacagaatgtctacaatcttctgcaatacagggtcgtt

SEQ ID NO: 6807 - DNA, 50 bp, Homo sapiens
ggcaagggaacaaacttgagtaaatctagctcttgaagggctcgggaccc

SEQ ID NO: 6808 - DNA, 50 bp, Homo sapiens
actcatttgtctcctcattctcaaaagtcttctgtggtttggcttcagtg

SEQ ID NO: 6809 - DNA, 50 bp, Homo sapiens
tcgatgggccattatccactctgctatcttctgaagagtaattttcacct

SEQ ID NO: 6810 - DNA, 50 bp, Homo sapiens
aaggacggaactcacacatcttctttagacagaaatgtagtctcactgca

SEQ ID NO: 6811 - DNA, 50 bp, Homo sapiens
tataatcccagtccatgagggtgtaaagtgaaatgagctggctggctgga

SEQ ID NO: 6812 - DNA, 50 bp, Homo sapiens
gctctgttctggggttggtccaaagtcaggtggagttccaatgtatgaaa

SEQ ID NO: 6813 - DNA, 50 bp, Homo sapiens
tccctgagatctaggagggcagcatagtatcatttttgtattccggtgct

SEQ ID NO: 6814 - DNA, 50 bp, Homo sapiens
agctgctacaaagaagacatgttttagacaaatactcatgtgtatgggca

SEQ ID NO: 6815 - DNA, 50 bp, Homo sapiens
agggatctgaatacttcgggtgcaaaaattttcctgcagtttagatttgc

SEQ ID NO: 6816 - DNA, 50 bp, Homo sapiens
tatggtttccaatatcgacatggcatcattggttacattagcactgggcc

SEQ ID NO: 6817 - DNA, 50 bp, Homo sapiens
ggcctgggcatagactgtggtgaggtcactagattatcttgttcttcccc

SEQ ID NO: 6818 - DNA, 50 bp, Homo sapiens
gagtcctgatctcagcttcatcaccaacattcctcgccttcagttgaatt

SEQ ID NO: 6819 - DNA, 50 bp, Homo sapiens
ggaggtctttgccaccaatgggagatgagcccaaactttcgatataggtg

SEQ ID NO: 6820 - DNA, 50 bp, Homo sapiens
accagaggtaaacttgagtgtaattgtcagacagacacacttttccacca

SEQ ID NO: 6821 - DNA, 53 bp, Homo sapiens
tgcattttacattagcttccaatatttatggcagtaaccaacagtattatcgt

SEQ ID NO: 6822 - DNA, 50 bp, Homo sapiens
tttccaatgctccttgctccattttaaacttgctgtcctttataagagaa

SEQ ID NO: 6823 - DNA, 50 bp, Homo sapiens
tgttttcacgatagaaataaggaaggtctagagcttctattctttggcca

SEQ ID NO: 6824 - DNA, 50 bp, Homo sapiens
tttcatacaaagccaacagaattcacagccacacactgcacaggtcatgt

SEQ ID NO: 6825 - DNA, 50 bp, Homo sapiens
aggaagctgtgagggtgggttcattagttgcagggatggtagttatgtca

SEQ ID NO: 6826 - DNA, 50 bp, Homo sapiens
gagacaagctggaaggccggacctcagaccggagggggtttatgtcattc

SEQ ID NO: 6827 - DNA, 50 bp, Homo sapiens
ataactagacaaggtctgagcactttgggtggggatggagtgagaaaggc

SEQ ID NO: 6828 - DNA, 50 bp, Homo sapiens
attaagttgggtaacgccagggttttcccagtcacgacgttgtaaaacga

SEQ ID NO: 6829 - DNA, 50 bp, Homo sapiens
gcgttctagctgggccaacagagcaggatttcgtttcagaaaacaaaaca

SEQ ID NO: 6830 - DNA, 50 bp, Homo sapiens
atcatgtctcattaacagagtgaagatggagcaacgtcatccagcttctg

SEQ ID NO: 6831 - DNA, 50 bp, Homo sapiens
tggtcgcgcccgaggtacggttttcatggtagggctgaatggaagatgtg

SEQ ID NO: 6832 - DNA, 50 bp, Homo sapiens
cagaaagataggagtgtgcaatggcaaggaaactcaatttaaagcaaatt

SEQ ID NO: 6833 - DNA, 50 bp, Homo sapiens
ttgcaaattctcatggtttgggttgggtggtggagagcgcgtgtcatctg

SEQ ID NO: 6834 - DNA, 50 bp, Homo sapiens
ttattcagcgtcacgatcagactgttacatttagcaatcaacagcatggg

SEQ ID NO: 6835 - DNA, 50 bp, Homo sapiens
tgtgtgtatgtgtgtaaccaggtctgactatagcttggtctgtctgtgtc

SEQ ID NO: 6836 - DNA, 50 bp, Homo sapiens
agcatttggggttttagctttggtgtcctaaatttcagtgatctttgcca

SEQ ID NO: 6837 - DNA, 50 bp, Homo sapiens
cataaaccagcagctcagcgtttctatagcaagcggtctcgagcacaagc

SEQ ID NO: 6838 - DNA, 50 bp, Homo sapiens
tagtgataggcgtggtggcggcgaaggtcagtaatggggcttttaaccag

SEQ ID NO: 6839 - DNA, 50 bp, Homo sapiens
tactgtagaaagaagaagagcacacatgagacagagaaggaggtggatgc

SEQ ID NO: 6840 - DNA, 50 bp, Homo sapiens
cgaggcggcccggcagggtaccaatttggatgaattcttgatagatttaa

SEQ ID NO: 6841 - DNA, 50 bp, Homo sapiens
ttgggttcagaatagcttcatctactgccgagcaaagtcaatacagcact

SEQ ID NO: 6842 - DNA, 50 bp, Homo sapiens
ggtaacagccatcccaccaccaataatcatctcattgtctttgtccagca

SEQ ID NO: 6843 - DNA, 50 bp, Homo sapiens
gtatgaatagattgccccattccctgccagcctggtagtgacttttccac

SEQ ID NO: 6844 - DNA, 50 bp, Homo sapiens
tataatttctaccaaactaagttttattttgtgcccgctccctgtccctt

SEQ ID NO: 6845 - DNA, 50 bp, Homo sapiens
ctgtaaaattcttttcgggtccatcctggctctcatctccagtgctttga

SEQ ID NO: 6846 - DNA, 56 bp, Homo sapiens
agggttaacaaaagtatggaattcaattctttttatatgctgcagccatgttcctg

SEQ ID NO: 6847 - DNA, 50 bp, Homo sapiens
cccaatctgaagtcagtaaatgaactaatctacaagcgtggttatggcaa

SEQ ID NO: 6848 - DNA, 50 bp, Homo sapiens
ccgaggtactctcttagagaaaggtgattggatgctccggttgcctgtaa

SEQ ID NO: 6849 - DNA, 50 bp, Homo sapiens
gcgggttggaaaatagtcgagaattgacagtccctctcgaagatgctttt

SEQ ID NO: 6850 - DNA, 50 bp, Homo sapiens
ttgagaccccaccaactgcaaaatctgttcctggcattaagctccttctt

SEQ ID NO: 6851 - DNA, 50 bp, Homo sapiens
aatgaaaaactccagctctcagctcacaaatctgtaatttaggtgtctct

SEQ ID NO: 6852 - DNA, 50 bp, Homo sapiens
tcgtcctggttaatctggaagtaacgtaattcgtaactctctttgctgtt

SEQ ID NO: 6853 - DNA, 50 bp, Homo sapiens
tcggttgttaagaactagagcttattcctattccaaatctatcttgcgct

SEQ ID NO: 6854 - DNA, 50 bp, Homo sapiens
agataagaacttcatcctaaagcatccgggccttggcatcttgtccatgc

SEQ ID NO: 6855 - DNA, 50 bp, Homo sapiens
actgatttcatcaagttcgacactggtaacctgtgtatggtgactggagg

SEQ ID NO: 6856 - DNA, 50 bp, Homo sapiens
aatcattggctacctcctccccttttacagtcacaagtccagatgtttgg

SEQ ID NO: 6857 - DNA, 50 bp, Homo sapiens
aataaatcccatacctcccattgaactaccacccaccccgaccaccataa

SEQ ID NO: 6858 - DNA, 50 bp, Homo sapiens
caagacatttccagccaacttcagaatgtagatctttgagccagacagct

SEQ ID NO: 6859 - DNA, 50 bp, Homo sapiens
gaggtactggcctgtgaagccctgaaggcactggcactggtaggaaccag

SEQ ID NO: 6860 - DNA, 50 bp, Homo sapiens
atcttctgtcaaagtcagtcgctgctccaagattgaaacagtctgtgtca

SEQ ID NO: 6861 - DNA, 50 bp, Homo sapiens
tggatggatttccaagtggcctcatatttatcatggtgctttaaatagca

SEQ ID NO: 6862 - DNA, 50 bp, Homo sapiens
ttcagcttagggaaagagagatacattttagattatagagcatcgcctgc

SEQ ID NO: 6863 - DNA, 50 bp, Homo sapiens
atcttcctatgtgcgccagataatgatcaagttcacaggtggtcttactt

SEQ ID NO: 6864 - DNA, 50 bp, Homo sapiens
agtttcttaagtcaaatgacacattagcccacgcaattcccagccccagc

SEQ ID NO: 6865 - DNA, 50 bp, Homo sapiens
ccctcttctgacatgaattaggcataatttagcaatcggttcttcccaaa

SEQ ID NO: 6866 - DNA, 50 bp, Homo sapiens
atacagtgaactggccactggctgtttgctatataaatggtatactgctt

SEQ ID NO: 6867 - DNA, 50 bp, Homo sapiens
aggttacttaaaagcatcattggcgtggtcctctcactaccaaagggcag

SEQ ID NO: 6868 - DNA, 50 bp, Homo sapiens
ctggggtcagcaaagaggggtagcaagtgtgccttagagatgaagaaatg

SEQ ID NO: 6869 - DNA, 50 bp, Homo sapiens
tttagagtacttagaggaggaccaggaaacactgagacagacacgcaggc

SEQ ID NO: 6870 - DNA, 50 bp, Homo sapiens
tgtttgaaaactaccttcatgggagcaatgacaagcacatgtctaggatt

SEQ ID NO: 6871 - DNA, 50 bp, Homo sapiens
tttgtgccaaggtttgggattttgtcttctagagcttcttctctattggt

SEQ ID NO: 6872 - DNA, 50 bp, Homo sapiens
tttttgacgctctctcactggtcttggcatttgatgtttctgttgaagcc

SEQ ID NO: 6873 - DNA, 50 bp, Homo sapiens
cctataatgggggaaagatgctggttagatgtttattttagtgggcttgc

SEQ ID NO: 6874 - DNA, 50 bp, Homo sapiens
ccacaaacacaccctgccacaagacatttagcacagaggaacagatccat

SEQ ID NO: 6875 - DNA, 50 bp, Homo sapiens
gacaccacaactcacctcctctattattagagatcccgagacattacggc

SEQ ID NO: 6876 - DNA, 50 bp, Homo sapiens
tgttacaatttcagcagttgaattcagtgaacactggttgaggagtgcct

SEQ ID NO: 6877 - DNA, 50 bp, Homo sapiens
ccttccgtattctcccaagtattcacaagccctcccttaaaaccctctct

SEQ ID NO: 6878 - DNA, 50 bp, Homo sapiens
acagccatctgggatgagccgcttttcagccaccatgtcttcaaattcat

SEQ ID NO: 6879 - DNA, 50 bp, Homo sapiens
taactgaatacagtctcatcttgccgcgcctggcttacctatctgtggaa

SEQ ID NO: 6880 - DNA, 50 bp, Homo sapiens
aggtactacacaaggtgtcagatggggttgccacaatgactaggacaaga

SEQ ID NO: 6881 - DNA, 50 bp, Homo sapiens; identical to SEQ ID NO: 363

SEQ ID NO: 6882 - DNA, 50 bp, Homo sapiens
gagagctttctccccgccttcagtttctgatggatctagccatgttgaaa

SEQ ID NO: 6883 - DNA, 50 bp, Homo sapiens
taaaactttctgccagggttccagagaaagagtaatttcctttgagtacc

SEQ ID NO: 6884 - DNA, 50 bp, Homo sapiens
cgctcgccgggccaggtaccaaaactttcataataaaaggtaggaaggat

SEQ ID NO: 6885 - DNA, 50 bp, Homo sapiens
tgacttcattgaaggctccatcacccaaagtagatgttaaaaaccttaat

SEQ ID NO: 6886 - DNA, 50 bp, Homo sapiens
tttatgtggaaggcttccctattacctcccagcgaaattcgtagtctttc

SEQ ID NO: 6887 - DNA, 50 bp, Homo sapiens
taaaatgttgccagtggaggaccgaatcaaggttattgctgacctcattt

SEQ ID NO: 6888 - DNA, 50 bp, Homo sapiens
agatatgttctgagccccgcccacacactgcctggttacagggagagaag

SEQ ID NO: 6889 - DNA, 50 bp, Homo sapiens
gaggttccttcatcccagaagaagcaacaggatttccagatcagggcaac

SEQ ID NO: 6890 - DNA, 50 bp, Homo sapiens
ctggtctgtgtcgttggctttatgacaggaagtgcctgtgggttatctta

SEQ ID NO: 6891 - DNA, 50 bp, Homo sapiens
cccaacgcttgtgtgcgtatgtatgtgtgtatttaacatcctgttcccat

SEQ ID NO: 6892 - DNA, 50 bp, Homo sapiens
gcataaaggcagccatttccattctctacattctctagtgatagcagagg

SEQ ID NO: 6893 - DNA, 50 bp, Homo sapiens
cgttacgcaatggagaagtccccttgaggctgaataatcacatctgtatc

SEQ ID NO: 6894 - DNA, 50 bp, Homo sapiens
aggccaaatcaccgcacagttgaattgctgattctaattggtaacaataa

SEQ ID NO: 6895 - DNA, 50 bp, Homo sapiens
ttgtagtgtaattgtgtgatacgcaaacctttagttaacccaagtgatga

SEQ ID NO: 6896 - DNA, 50 bp, Homo sapiens
ccttgttgccgtgggtatatgcatgatcttaccttttgtttgactatgaa

SEQ ID NO: 6897 - DNA, 50 bp, Homo sapiens
aaatgatatgttaagcacccaaatcttcacatggaggggaagggggtggg

SEQ ID NO: 6898 - DNA, 50 bp, Homo sapiens
ggccaaagctgtttattatgagatctttgagtggaatcagcatgtctccc

SEQ ID NO: 6899 - DNA, 50 bp, Homo sapiens
ttaacagcattgaaggtgaaacagcacaatgtcccattccaaatttattt

SEQ ID NO: 6900 - DNA, 50 bp, Homo sapiens
aggtacgaaaatacattctggcatcacacccctgaacccaagactgttct

SEQ ID NO: 6901 - DNA, 50 bp, Homo sapiens
gaactacctactggcagttgggttcagggagatgggattgacttcgcctt

SEQ ID NO: 6902 - DNA, 50 bp, Homo sapiens
agagctaatatacagagtacctgacacactacctcaccaacagtttaact

SEQ ID NO: 6903 - DNA, 50 bp, Homo sapiens
gcccaggcaacaagaatacttttatctttgatccgttctgtttatccagt

SEQ ID NO: 6904 - DNA, 50 bp, Homo sapiens
ctgagggtagactgtgggcaaagaggacaactctccctcccctaagggac

SEQ ID NO: 6905 - DNA, 50 bp, Homo sapiens
tgcccagacctatttccttaggacagtattctaaagttcagtagtccagt

SEQ ID NO: 6906 - DNA, 50 bp, Homo sapiens
gccctgtcccttgagaggctcacagcgatggaggccacttttgttgtttg

SEQ ID NO: 6907 - DNA, 50 bp, Homo sapiens
accaaaaagggctacattaccaccactgtatcataaaagccagccacctt

SEQ ID NO: 6908 - DNA, 50 bp, Homo sapiens
agctgacgattttctatcccggcctatagtgcatgtatggcaattgagca

SEQ ID NO: 6909 - DNA, 50 bp, Homo sapiens
ccccaaaacaaacaaaataaaccacaccagatatcagtcacatccttgaa

SEQ ID NO: 6910 - DNA, 50 bp, Homo sapiens
agtctgttattgcctgattttgtccccaccttgttcaaatttccaaagct

SEQ ID NO: 6911 - DNA, 50 bp, Homo sapiens
ctcacagccgaagctctgatcctttgttctcaggaaacactcaggaagtg

SEQ ID NO: 6912 - DNA, 50 bp, Homo sapiens
agagaaaatgagagacagacagtgagtgggaaagtcagcgaaaaggaaaa

SEQ ID NO: 6913 - DNA, 50 bp, Homo sapiens
tccttgagtttatacaccgtgctatgagtgatgacagccaattcccatgc

SEQ ID NO: 6914 - DNA, 50 bp, Homo sapiens
tcgcttcaggggtcagccaaaagatagacagccaggtaacttgagtggac

SEQ ID NO: 6915 - DNA, 50 bp, Homo sapiens
ggacagtaccaaacactcccctcctcccctctgcctctttgcttacttag

SEQ ID NO: 6916 - DNA, 50 bp, Homo sapiens
gaccaaatactgaacttccaccctgcataataatcatgaacaccgcacca

SEQ ID NO: 6917 - DNA, 50 bp, Homo sapiens
aggtgagcagtgcctcagatacctgcaaaacctttctgcacaaatgtgct

SEQ ID NO: 6918 - DNA, 50 bp, Homo sapiens
cagatccaatgagggtcccatctcttcccacttcaatcccgtgttgttct

SEQ ID NO: 6919 - DNA, 50 bp, Homo sapiens
ccaaccaaaccatcaaacagcagggagctagtgaagaggtctattgttcc

SEQ ID NO: 6920 - DNA, 50 bp, Homo sapiens
acatcgcctaaaaccgtgcatcgtaaacatttacctcaaagtcatcctct

SEQ ID NO: 6921 - DNA, 50 bp, Homo sapiens
ttttcactcctctcagagtctactccacctctcctcactccccaggacac

SEQ ID NO: 6922 - DNA, 50 bp, Homo sapiens
agatctgtgttcgtctctaggtaataggaaacacaatccagacatgatct

SEQ ID NO: 6923 - DNA, 50 bp, Homo sapiens
ttcatgaactcggagaggtccatggtgcactcccgctcgtcctgggacac

SEQ ID NO: 6924 - DNA, 50 bp, Homo sapiens
ctggcaatattaacttgggttctgtttcatctctggctataagccataca

SEQ ID NO: 6925 - DNA, 50 bp, Homo sapiens
tgccattcttttgttgaacctgtaaaggtaaggcccagattctgaaacct

SEQ ID NO: 6926 - DNA, 50 bp, Homo sapiens
taaagcacttatgagaatgctgcatttgtacatgagctacgcctcatctt

SEQ ID NO: 6927 - DNA, 50 bp, Homo sapiens
gcacccacctcctcagttcagacaagcccagcacccaaataccactatct

SEQ ID NO: 6928 - DNA, 50 bp, Homo sapiens
agcgcatgagtgactcccatctatatatgtcagtcgtctctggtgcaagg

SEQ ID NO: 6929 - DNA, 50 bp, Homo sapiens
gaaacagtggcccgggtcgtagtgcgctgtccagatcttcacgctacacc

SEQ ID NO: 6930 - DNA, 50 bp, Homo sapiens
agtgcattcacactgatgataaacgatagtagcttcacaggtttgcttct

SEQ ID NO: 6931 - DNA, 50 bp, Homo sapiens
gcttcaaaattccttacccccaacctctggcaccccaaattgtatcacta

SEQ ID NO: 6932 - DNA, 50 bp, Homo sapiens
gaggaagggctggctcttactccccacaagaggtgttccttaggccacac

SEQ ID NO: 6933 - DNA, 50 bp, Homo sapiens
ccaatctaatttaaaccctcataacaggacataagcttgcgcccgcatct

SEQ ID NO: 6934 - DNA, 50 bp, Homo sapiens
tgctcaatgttttgcactgattttattcaatgttttgaagggcgttatga

SEQ ID NO: 6935 - DNA, 50 bp, Homo sapiens
tgctaacaacagcttctcggtatgttaatattctgctaactcctttctca

SEQ ID NO: 6936 - DNA, 50 bp, Homo sapiens
ggaggaatggctgtgcccgtcccctccacttaagcgacctgagtctccag

SEQ ID NO: 6937 - DNA, 50 bp, Homo sapiens
acacacacttaagagtacagatgagagccaaaaataagtggcaggtcttt

SEQ ID NO: 6938 - DNA, 50 bp, Homo sapiens
ttttgtgactgtgcatgcttgaaaagaataagttttctgcagctgtgtct

SEQ ID NO: 6939 - DNA, 50 bp, Homo sapiens
cttgtctgtggcgtggcacacagtaggtgctcggtttgtgttgttgaatg

SEQ ID NO: 6940 - DNA, 50 bp, Homo sapiens
gaattctgaatacatgttggactgtgtttctttgacctgtgtttcctagg

SEQ ID NO: 6941 - DNA, 50 bp, Homo sapiens
tgagtccttggcctcagcttctaatctcaaacctaaaatagattgcgttt

SEQ ID NO: 6942 - DNA, 50 bp, Homo sapiens
tcttctcgtctttgctattaaatttcttcacggaccatgcatctggagga

SEQ ID NO: 6943 - DNA, 50 bp, Homo sapiens
ccagagactcctaagcagaatcaaggatgtgtggcataagcatgagagcc

SEQ ID NO: 6944 - DNA, 50 bp, Homo sapiens
cccataaagaggaataagctactgtcctcagctcttgttagctcaggctt

SEQ ID NO: 6945 - DNA, 50 bp, Homo sapiens
agagtttgtaacacaatccagtccacatgcttatccaatcccatcatcca

SEQ ID NO: 6946 - DNA, 50 bp, Homo sapiens
agctcaaaatatggcaaagtgatgatttcgtgttaatcctagaaacagca

SEQ ID NO: 6947 - DNA, 50 bp, Homo sapiens
tgggtctgctttcacatgaaagtgctacgaattctcttttgtgctgagcc

SEQ ID NO: 6948 - DNA, 50 bp, Homo sapiens
ggatgagcccactcacagcaccagatttgtactgaaagtaccttaatatc

SEQ ID NO: 6949 - DNA, 50 bp, Homo sapiens
aacccaaatccaaatgccaggatagaagaatttgtttatgagaaactgga

SEQ ID NO: 6950 - DNA, 50 bp, Homo sapiens
cgctttttgatctgattactatttcacacaggttacagctatgaccatga

SEQ ID NO: 6951 - DNA, 50 bp, Homo sapiens
ctgccgctaattcactagtaatttcgatcgtccgccctccaggtacatat

SEQ ID NO: 6952 - DNA, 50 bp, Homo sapiens
aggcgtgctattaattatcccataccctccttacagaaattacactcgca

SEQ ID NO: 6953 - DNA, 50 bp, Homo sapiens
gggagaagttctttaaactaagggtacaaaatgaattgaatgctgggggc

SEQ ID NO: 6954 - DNA, 50 bp, Homo sapiens
attagcgtgttcgcgcccgaggtacaccaaaaccttcagaaagcaaagtt

SEQ ID NO: 6955 - DNA, 50 bp, Homo sapiens
aagatatgaaatatgcctacccgcagagcttggcacaaagtggagtcaat

SEQ ID NO: 6956 - DNA, 50 bp, Homo sapiens
gtacagagatcggatcacacaagcccggagacagtgcagcttctccactg

SEQ ID NO: 6957 - DNA, 50 bp, Homo sapiens
aatgcacttgtgataaactgacagcagggttagacattactttcaaagct

SEQ ID NO: 6958 - DNA, 50 bp, Homo sapiens
ccactgctcaggaaactgcctgttcggtgctcctccaattcaattaagct

SEQ ID NO: 6959 - DNA, 50 bp, Homo sapiens
agtgctggtataactgcagaaagagatagagaagagagatcagtgagagc

SEQ ID NO: 6960 - DNA, 50 bp, Homo sapiens
aagtcaggacctttgcacttgccccgcctctgccttcacagctcttctca

SEQ ID NO: 6961 - DNA, 50 bp, Homo sapiens
taatcagggaagagcttgagatcattagcaactgaactgaacagggagtt

SEQ ID NO: 6962 - DNA, 50 bp, Homo sapiens
ctgggtcacgtcgcccaccaatggtatctgtgtggttaggcattaggctg

SEQ ID NO: 6963 - DNA, 50 bp, Homo sapiens
ggtggtaggtgagtgggtattgcgggctagtatccgagcaaaagatggtg

SEQ ID NO: 6964 - DNA, 50 bp, Homo sapiens
cagccctgctatctctggttgttcatgtacttctgtaaggtggagaccct

SEQ ID NO: 6965 - DNA, 50 bp, Homo sapiens
gaaggtgagaaacccgagagacaccaactatgatttttacttttcctggt

SEQ ID NO: 6966 - DNA, 50 bp, Homo sapiens
accacccctcccttccctcctttaactcatctcgaatctctctcatacat

SEQ ID NO: 6967 - DNA, 50 bp, Homo sapiens
ctcttatcctgctctgccctggaacttgaaccccagtgccaatactcatg

SEQ ID NO: 6968 - DNA, 50 bp, Homo sapiens
cgacctaatctctgtccccagaaggcagaccaggactccagccccaggag

SEQ ID NO: 6969 - DNA, 50 bp, Homo sapiens
gccaaatctttgtcctgtacaaagtacagatgtttttgactgaagttcca

SEQ ID NO: 6970 - DNA, 50 bp, Homo sapiens
gccacagtgaataaatacaaggcaaggctcataggtaaaacaagttctat

SEQ ID NO: 6971 - DNA, 50 bp, Homo sapiens; identical to SEQ ID NO: 5545

SEQ ID NO: 6972 - DNA, 50 bp, Homo sapiens
aaacccacccatcatttgccctgactacccatctcccgattaattcaccc

SEQ ID NO: 6973 - DNA, 50 bp, Homo sapiens
agggaacagagccaggatttaaactctaacaatttgtctccacaattgca

SEQ ID NO: 6974 - DNA, 50 bp, Homo sapiens
ctcctggcacgacagaactagtagtttccatgtcttgaggacataggtcc

SEQ ID NO: 6975 - DNA, 50 bp, Homo sapiens
tcgaacctgttccaggtatgctgatagatgtcggtagggcatccttaatt

SEQ ID NO: 6976 - DNA, 50 bp, Homo sapiens
gaggtactataaaccagatgcccaaaacacctgccctcctgggttggccg

SEQ ID NO: 6977 - DNA, 50 bp, Homo sapiens
acattcatctgtttccactgaggtctgagtcttcaagttttcaccccagc

SEQ ID NO: 6978 - DNA, 50 bp, Homo sapiens
ttagcccttttctgcgctaattagaatttcaagcgtcacagagcctgggg

SEQ ID NO: 6979 - DNA, 50 bp, Homo sapiens
ttcaacgaggtgaaccagtgtgatgtctgtggggaaaacacgtagtcagg

SEQ ID NO: 6980 - DNA, 53 bp, Homo sapiens
ggaaaaaagaaatttcctgagatttccagtgtatacagaagtgtctttccatt

SEQ ID NO: 6981 - DNA, 50 bp, Homo sapiens
gagttcacgtggggtggccctcctcagtgctcttagggtactgtactgtc

SEQ ID NO: 6982 - DNA, 50 bp, Homo sapiens
ccaccttcgaggtcccttccggcctaagatgcctgaaatctccaaggaaa

SEQ ID NO: 6983 - DNA, 50 bp, Homo sapiens
acaaggcaaagcttaaagaaacactaaacgaatgagtgaaagaagcggag

SEQ ID NO: 6984 - DNA, 50 bp, Homo sapiens
ttctcaataacaaacccagggctttcataaatgcatgatcaaaatgtgga

SEQ ID NO: 6985 - DNA, 50 bp, Homo sapiens
acagaaaatagggtgtatatcagcattacgctgattcagcagaagatagc

SEQ ID NO: 6986 - DNA, 50 bp, Homo sapiens
tctcgactgacacccactataaattccctgggttgaaaaacttttctttt

SEQ ID NO: 6987 - DNA, 50 bp, Homo sapiens
tccaaacccctccattacaatctaacacacttccccctacatcgtctcct

SEQ ID NO: 6988 - DNA, 50 bp, Homo sapiens
gcatttattttcttctacagagaacctggcggctgggtctgggaaagagc

SEQ ID NO: 6989 - DNA, 50 bp, Homo sapiens
acccacaattagtgagagtgcccttgagcttgagattcccattcctcctt

SEQ ID NO: 6990 - DNA, 50 bp, Homo sapiens
tggatataaagtgtgtgttctgacagaaaatggggagaaggtggctattt

SEQ ID NO: 6991 - DNA, 50 bp, Homo sapiens
gccagaaaatcctggtttccctggtgtcccctccaatctcttttaccaaa

SEQ ID NO: 6992 - DNA, 50 bp, Homo sapiens
ccattgtcgcccggagctggaaagatagtttagagaatgccttagcactt

SEQ ID NO: 6993 - DNA, 50 bp, Homo sapiens
cagcacccagtacaggtatgcaggaaggactcgcttgacttagagagtgg

SEQ ID NO: 6994 - DNA, 50 bp, Homo sapiens
aacacaccagaaggaaaagacacagacagggaatgaagcctgcaaagtcc

SEQ ID NO: 6995 - DNA, 50 bp, Homo sapiens
gtaactcagtgcccccaaagattcatagtcagcaggattggccagcaaat

SEQ ID NO: 6996 - DNA, 50 bp, Homo sapiens
cgccccaaatataaaatctcaataccagttccttttccccagtaccccag

SEQ ID NO: 6997 - DNA, 50 bp, Homo sapiens
agtcacaggatgttctctgcacctcatctgcaactctgagccttactcaa

SEQ ID NO: 6998 - DNA, 50 bp, Homo sapiens
gttagagccctcgtgccctgcttcttcagctaccatttctctctgtgacc

SEQ ID NO: 6999 - DNA, 50 bp, Homo sapiens
ccaccacaaccacacacacaaaaagtcaacccacacgaatataccggaaa

SEQ ID NO: 7000 - DNA, 50 bp, Homo sapiens
cagttgggctgttagtagtctgtcacacaggtgagaggagcaagagatcc

SEQ ID NO: 7001 - DNA, 50 bp, Homo sapiens
aatctattatcaggcatttaatcactgagcactcttctgtcccacactgt

SEQ ID NO: 7002 - DNA, 50 bp, Homo sapiens
agaggagtgacggtgaatggtactgaaagcggttgtaaattgcgagagag

SEQ ID NO: 7003 - DNA, 50 bp, Homo sapiens
tctccttgttctgattctctccccatctacaacaactccactccccaaag

SEQ ID NO: 7004 - DNA, 50 bp, Homo sapiens
cacctaaccaagcgggttgggctgatgaccgatgaccgtaagcagtaagg

SEQ ID NO: 7005 - DNA, 50 bp, Homo sapiens
acctcttctttagcaacactaaccactccacactggggaaattatactct

SEQ ID NO: 7006 - DNA, 50 bp, Homo sapiens
actaccgcacaacagaacacatgaccaggtgagtgcagacacgacatcag

SEQ ID NO: 7007 - DNA, 50 bp, Homo sapiens
cagttttactcctggtcatctcttgtgagtgtggattcttctctgcccct

SEQ ID NO: 7008 - DNA, 50 bp, Homo sapiens
ttttattttggctgaagtttgggtatggctgcttgttggcctctgctggg

SEQ ID NO: 7009 - DNA, 50 bp, Homo sapiens
acagcttataaagcactttctcatgcacttcttctcgccgtatttgcaca

SEQ ID NO: 7010 - DNA, 50 bp, Homo sapiens
ggggctcaaacctgtgacttactgctaactaacatcaaaggaaaagctgg

SEQ ID NO: 7011 - DNA, 50 bp, Homo sapiens
atgatcattgatagatattctaagagcatgcaggaatgaggatgcgtgcc

SEQ ID NO: 7012 - DNA, 50 bp, Homo sapiens
gacaacaaacctgcttgcttggttacccacagcgcactgagtatagaagt

SEQ ID NO: 7013 - DNA, 50 bp, Homo sapiens
tcttcaattattcatgctctaaggcagtgtctgtcttcccaccatcccgc

SEQ ID NO: 7014 - DNA, 52 bp, Homo sapiens
tgagtatttttaaaatcccctgtttggatgcttccagctaaatagtctacct

SEQ ID NO: 7015 - DNA, 52 bp, Homo sapiens
tgggtttactcagatcttctccttcttaagtgagagttttaacctacatttt

SEQ ID NO: 7016 - DNA, 50 bp, Homo sapiens
gtccagagctagaagaaccaagtcttcctttcttcattcattgttcaggt

SEQ ID NO: 7017 - DNA, 50 bp, Homo sapiens
cttcttcttaggatctggagggaggggagtgttagagcttgtgagccatg

SEQ ID NO: 7018 - DNA, 50 bp, Homo sapiens
ctgaacgaaccagttcttttggactaccagttcttgaagtgaagctcaga

SEQ ID NO: 7019 - DNA, 50 bp, Homo sapiens
aacaaaagcactgacaagctcatatgaacaggctaaaaagtgagtgaagt

SEQ ID NO: 7020 - DNA, 50 bp, Homo sapiens
ttctctttctatatctagctaaattgcctgtgcgcctcccatcctcctca

SEQ ID NO: 7021 - DNA, 50 bp, Homo sapiens
acacacttgataaattagaccgatgcaaaccgcaagaatccaaatcagct

SEQ ID NO: 7022 - DNA, 50 bp, Homo sapiens
atagtaggtgagccagtagtgtgaatgcttgtcaagcttccaaggatgga

SEQ ID NO: 7023 - DNA, 50 bp, Homo sapiens
aaccaccacccagcttcctggtacaagcagggactctggctacagtgcta

SEQ ID NO: 7024 - DNA, 50 bp, Homo sapiens
tttcctcccctccctccccaatccacaaaacacgtaattctgactatcca

SEQ ID NO: 7025 - DNA, 50 bp, Homo sapiens
caacattcacaaaactggtccccgaattagtgagaaggttccaggagtgc

SEQ ID NO: 7026 - DNA, 50 bp, Homo sapiens
gagagattatagcacagtctcccagggctcagtcaggtcatccgcagcaa

SEQ ID NO: 7027 - DNA, 50 bp, Homo sapiens
ttcaatgctttgtcctcccctcgcagatgtttagaacagatcctccttct

SEQ ID NO: 7028 - DNA, 50 bp, Homo sapiens
tccctctctcagggctgggaaagaaaggttcatcttcactcagatgcaag

SEQ ID NO: 7029 - DNA, 50 bp, Homo sapiens
ttctgttggtctgccagctcatccattcatccatcacctgccagctagac

SEQ ID NO: 7030 - DNA, 50 bp, Homo sapiens
acacagttttggctcccttattttccccgtactcgaaacatttccatgca

SEQ ID NO: 7031 - DNA, 50 bp, Homo sapiens
accaaatcgcaaaaatacagaatgcctgtaaattgagtcacaccttaaaa

SEQ ID NO: 7032 - DNA, 50 bp, Homo sapiens
gagtccataaatctgcatttcatgtagttgtaagactttctcccaaaggt

SEQ ID NO: 7033 - DNA, 50 bp, Homo sapiens
tccatttgagttttcttcccatctctcacagttgattgttctgtcccttc

SEQ ID NO: 7034 - DNA, 50 bp, Homo sapiens
aaaattcagccctcctggattcacgtgcccaatgaaagtccccaaactag

SEQ ID NO: 7035 - DNA, 50 bp, Homo sapiens
tttaacaggaaaagcccaaaattatttttatgctgtctacaatctgggcc

SEQ ID NO: 7036 - DNA, 50 bp, Homo sapiens
agttgcactggttgttcttggctgcggtgcttctcacacaagaagcccag

SEQ ID NO: 7037 - DNA, 50 bp, Homo sapiens
tttcctttttcccttgtcccttggcttcccccatcaccgaatcccccttc

SEQ ID NO: 7038 - DNA, 50 bp, Homo sapiens
ctcccacgcctggccgtagtccagagcttcttctttttcatggttgggtt

SEQ ID NO: 7039 - DNA, 50 bp, Homo sapiens
gccagtgtacgttgccaggcatttcatgtaagagaaaactcaaatagcca

SEQ ID NO: 7040 - DNA, 50 bp, Homo sapiens
ccgtcttcttttgggtgtttcctcctagtttcggcggaaatcagagttca

SEQ ID NO: 7041 - DNA, 50 bp, Homo sapiens
atgaaccctcacctgctctgcagtgcagttttgattttagtcccagcaaa

SEQ ID NO: 7042 - DNA, 58 bp, Homo sapiens
agatatagatggtaaaatgtgatgcaatgtaaaaaaatggtaatacacacactctcca

SEQ ID NO: 7043 - DNA, 50 bp, Homo sapiens
tgagtgggcttctcttatggtacagtctcttctctatgaggggcttcaaa

SEQ ID NO: 7044 - DNA, 50 bp, Homo sapiens
tgggcttccaaatggtacaatggagtaatcaagctcatggactgagagtt

SEQ ID NO: 7045 - DNA, 50 bp, Homo sapiens
cttgaagctacttgtccctttctgtgccagaccacttaatggctacccac

SEQ ID NO: 7046 - DNA, 50 bp, Homo sapiens
ttcccagggcgctccatctacagccttactgtgactccactcagcaccag

SEQ ID NO: 7047 - DNA, 50 bp, Homo sapiens
attccccctaagctcctgtcccccgccatgcacgactggtcacatcaaaa

SEQ ID NO: 7048 - DNA, 50 bp, Homo sapiens
aagacacacccctcctgtttaataaaagttgtcccctcgacatgcataat

SEQ ID NO: 7049 - DNA, 50 bp, Homo sapiens
cctggttacaataatgaaactgtcgtggagtaaagagggaaacatgacca

SEQ ID NO: 7050 - DNA, 50 bp, Homo sapiens
agaacccacacactgggagacaataactgccattcatataaccaacagaa

SEQ ID NO: 7051 - DNA, 50 bp, Homo sapiens
cgccactgcttaaagattacagacaattcccaggtaaagttgccaggact

SEQ ID NO: 7052 - DNA, 50 bp, Homo sapiens
acaatgatgtttgaaacgcactctgaatctgtgaaagctagataagtcct

SEQ ID NO: 7053 - DNA, 50 bp, Homo sapiens
gccttcctcctcctccctcttgggcctatgtcctagataagcctgttaaa

SEQ ID NO: 7054 - DNA, 50 bp, Homo sapiens
tgtcaagatgacagatcttaatccagagtggaggctcgttcggcctggag

SEQ ID NO: 7055 - DNA, 50 bp, Homo sapiens
tttatgtttcagcctctttctctcccgttgagtcctgccacaagtcctgc

SEQ ID NO: 7056 - DNA, 50 bp, Homo sapiens
attgtccaggtgacttgacacttgcctaccggaaaagttgggatgttctt

SEQ ID NO: 7057 - DNA, 50 bp, Homo sapiens
taaaatatgccctaatttaaagggcgcagggtcccacaacaagccacaga

SEQ ID NO: 7058 - DNA, 50 bp, Homo sapiens
aaatctcttctcacgttctgtttgtcatttaatcaccaggtttttagcgc

SEQ ID NO: 7059 - DNA, 50 bp, Homo sapiens
gctactgatgggtggccctttattcttgtctttatttgttgtgtgcagga

SEQ ID NO: 7060 - DNA, 50 bp, Homo sapiens
aaaaattggtagctgcccccatgtggtatgatgtttaatttgaacaacat

SEQ ID NO: 7061 - DNA, 50 bp, Homo sapiens
acccggcacgtctcctcaaccccttaattcttttccagcttttcatatta

SEQ ID NO: 7062 - DNA, 50 bp, Homo sapiens
ctcaagagggcatagacattccacacgaggactgcattcgtcagggtaac

SEQ ID NO: 7063 - DNA, 50 bp, Homo sapiens
aacaaatacccaattaactgtattcccctttcccctatgactgctggtgt

SEQ ID NO: 7064 - DNA, 50 bp, Homo sapiens
ccgttgtccgaaagcttgcttccaactaaagaccagagatgggagggagt

SEQ ID NO: 7065 - DNA, 50 bp, Homo sapiens
tttagcccaaagaagactttcgcataaattctgccgtaacccttgttgga

SEQ ID NO: 7066 - DNA, 50 bp, Homo sapiens
caaagcagcaaatacagagcacacaacaatccttggcctgagcagaacaa

SEQ ID NO: 7067 - DNA, 50 bp, Homo sapiens
atatgaagatggattggatgaggactgacaaaacgaagacatgccgggcc

SEQ ID NO: 7068 - DNA, 50 bp, Homo sapiens
atgcctagtcagtcagtatttcttcttgctgcaggtgtctaaaaacccac

SEQ ID NO: 7069 - DNA, 50 bp, Homo sapiens
ccttcgcattcccccatccatgctccaagataatagatttttctttaaaa

SEQ ID NO: 7070 - DNA, 50 bp, Homo sapiens
ggggaacactttggtttgaaagcacagagcagtttgccatgtttcttctg

SEQ ID NO: 7071 - DNA, 50 bp, Homo sapiens
actgaatggtcgaaatcacatatgcaccacacatactgatcttaagtaac

SEQ ID NO: 7072 - DNA, 50 bp, Homo sapiens
cgaggtacagcaaagcgacccttggtgtcatagatcagacggaaattctc

SEQ ID NO: 7073 - DNA, 50 bp, Homo sapiens
tacagaagagcagagaccaaccttctcaaagttggtgagtattaacccag

SEQ ID NO: 7074 - DNA, 50 bp, Homo sapiens
ccagatttgctgatgtgttaggtagttgtggcacactcacctgtctttcc

SEQ ID NO: 7075 - DNA, 50 bp, Homo sapiens; identical to SEQ ID NO: 379

SEQ ID NO: 7076 - DNA, 50 bp, Homo sapiens
ttgaacattcgcaaagtaacatctctcactcccaacaccacagcttatcg

SEQ ID NO: 7077 - DNA, 50 bp, Homo sapiens
agtaaccaccaaagcatagttttagaagggctttcgcaaacctagccttt

SEQ ID NO: 7078 - DNA, 50 bp, Homo sapiens
tcttgcttgttcttctcgtttttgttttatcttccgcccggcagggtcag

SEQ ID NO: 7079 - DNA, 50 bp, Homo sapiens
gctctgaaacccctggaactcttgagcctaaaatgtatttttacaatctt

SEQ ID NO: 7080 - DNA, 50 bp, Homo sapiens
atctttgatgtgaagccctttaaaaataaacgtgaaggtgccagcttgca

SEQ ID NO: 7081 - DNA, 50 bp, Homo sapiens
acccagcctgatgttcatcttttccccctcttcattttccttctttgttt

SEQ ID NO: 7082 - DNA, 50 bp, Homo sapiens
agaaagactaacaccagaaatcatgctgcaacaccagaacatcctttgga

SEQ ID NO: 7083 - DNA, 50 bp, Homo sapiens
tcacaaaatatggctcaaggagtataaatcccctctcacgcacccacaaa

SEQ ID NO: 7084 - DNA, 50 bp, Homo sapiens
actaaccaaccaatgagaatactacttacctccacccatgctgtgaaccc

SEQ ID NO: 7085 - DNA, 50 bp, Homo sapiens
tgaccgcctcaaagaccaaaaggactctactccatattcttctcactgtc

SEQ ID NO: 7086 - DNA, 50 bp, Homo sapiens
gaatgaccacctgacgcattcagagctcaccttcttgttcttcagctgtt

SEQ ID NO: 7087 - DNA, 50 bp, Homo sapiens
ttggtagaaaccacccaaccataaaattcccaagcctgtactggtcagcc

SEQ ID NO: 7088 - DNA, 50 bp, Homo sapiens
cataagttgggtgaagaaatggtggttttaatcagtaatatagctccccc

SEQ ID NO: 7089 - DNA, 50 bp, Homo sapiens
ttctcatctcaatatcccccagagccccagtacctcataatacaagactt

SEQ ID NO: 7090 - DNA, 50 bp, Homo sapiens; identical to SEQ ID NO: 383

SEQ ID NO: 7091 - DNA, 50 bp, Homo sapiens
tacccaaagtctattcgtaagtgcatcttttctattagactggaagctcc

SEQ ID NO: 7092 - DNA, 50 bp, Homo sapiens
gatggttcagcaactgaggagctcagggtgacgggtccacagagcacaga

SEQ ID NO: 7093 - DNA, 50 bp, Homo sapiens
agaaattagaagatgactaccatttgctaaagtctatccacatgccagca

SEQ ID NO: 7094 - DNA, 50 bp, Homo sapiens
ccccctcgaccccctcacaccctttccagagaggccttaagattcccatt

SEQ ID NO: 7095 - DNA, 50 bp, Homo sapiens
tgtaaggtttcataaatttagagaccctagccagtcagtgacaatatgca

SEQ ID NO: 7096 - DNA, 52 bp, Homo sapiens
gagttgcttattccagtctctctaagatatatctccctttttagttgctgac

SEQ ID NO: 7097 - DNA, 50 bp, Homo sapiens
tggtgtaatgaacatgccgtattgcctttatggccagtttgagtccttcc

SEQ ID NO: 7098 - DNA, 50 bp, Homo sapiens
agggaaccccaaagagttaaaaccaggaccactatttcatagtcaacaaa

SEQ ID NO: 7099 - DNA, 50 bp, Homo sapiens
gtggtaaatgagagcattacagaccacccacatcagcctaaaatataatt

SEQ ID NO: 7100 - DNA, 50 bp, Homo sapiens
ccaccaaacccaacaggccgggacaaatgcaataccatacagaaacacag

SEQ ID NO: 7101 - DNA, 50 bp, Homo sapiens
ggccaaactttcttactctgccatttgttcaatgtcctaatgagcatgaa

SEQ ID NO: 7102 - DNA, 50 bp, Homo sapiens
atcaatcgggccaatccgaagtcagcaatcttgcatatgagtccattccc

SEQ ID NO: 7103 - DNA, 50 bp, Homo sapiens
tatttttaacaaaatcacacggaaggatttccttcccgtcccatgtgttg

SEQ ID NO: 7104 - DNA, 50 bp, Homo sapiens
cagatagtggtatttgggtgctgggcttgtctgacctgaggaggtggctg

SEQ ID NO: 7105 - DNA, 50 bp, Homo sapiens
aactccatagagaaagactacgaatttcgctgggaggtaatagggaagcc

SEQ ID NO: 7106 - DNA, 50 bp, Homo sapiens
gcatttaggaaagacaggtgagtgtgccacaactacctaacacatcagca

SEQ ID NO: 7107 - DNA, 50 bp, Homo sapiens
ttactttgtcttctctcaccatcctaaaacgttgttttgctgagcatgaa

SEQ ID NO: 7108 - DNA, 50 bp, Homo sapiens
ccccagacgaaaataccaaatgcatggagagctcccgtgagtggttaata

SEQ ID NO: 7109 - DNA, 50 bp, Homo sapiens
gcctaagtttccagaagactttgacgatggagagcatgcaaagcaggtaa

SEQ ID NO: 7110 - DNA, 50 bp, Homo sapiens
ttttgcagttcaaggattggtgggaaacgtttgtatgtgttggggtgggg

SEQ ID NO: 7111 - DNA, 50 bp, Homo sapiens
aatagatttccatttcttccttcgagttagttgggtattgggaccttgaa

SEQ ID NO: 7112 - DNA, 50 bp, Homo sapiens
cgacggtgttctggagtttcgatgagacatgtaagtaagagttctgtgca

SEQ ID NO: 7113 - DNA, 50 bp, Homo sapiens
atattcagcagtggctgtgaaattggatttgaattaccgggatacatgca

SEQ ID NO: 7114 - DNA, 50 bp, Homo sapiens
actggttttcattctagtgtcccccacccgtctagtttcattttcctgta

SEQ ID NO: 7115 - DNA, 50 bp, Homo sapiens
ttgggagtcaccaggttaaagcaaagcctcagtcactgaaagcagaaact

SEQ ID NO: 7116 - DNA, 50 bp, Homo sapiens
tcctgtgctccagaattagtgattgctttggtgcttaacttgaagtggga

SEQ ID NO: 7117 - DNA, 50 bp, Homo sapiens
catctgctctgcttcctcacacactagaaacaccactgcccccatccatg

SEQ ID NO: 7118 - DNA, 50 bp, Homo sapiens
tctgtgatttatagactgttttcaggaaacgatcttcccatctgtggtga

SEQ ID NO: 7119 - DNA, 50 bp, Homo sapiens
tcatttcaggtctaataaacacactaacctcggcagcactggagcgtctg

SEQ ID NO: 7120 - DNA, 50 bp, Homo sapiens
agcttaggatatctattagtgttcactgttcgggcaagaggcctaaaggg

SEQ ID NO: 7121 - DNA, 50 bp, Homo sapiens
tgggaacacactggcccattatatagagaaaaataaaacatgatccccat

SEQ ID NO: 7122 - DNA, 50 bp, Homo sapiens
ttgcttgatttcccaaaccactacctgaaggtggcttatggtctacagct

SEQ ID NO: 7123 - DNA, 50 bp, Homo sapiens
ttccaccacttcaagactgggggcaggtagagaagacaagcataagtaca

SEQ ID NO: 7124 - DNA, 50 bp, Homo sapiens
ttcttctctgcccctaacagaatgttcttctcttgcttcccacaccctcc

SEQ ID NO: 7125 - DNA, 50 bp, Homo sapiens
cagcacatcttctggtttacaagttgggtaactatgaaagctggagatgc

SEQ ID NO: 7126 - DNA, 50 bp, Homo sapiens
tatctaaattctacctttagcatccaactagctaccgtctggcactggcc

SEQ ID NO: 7127 - DNA, 50 bp, Homo sapiens
tccaatgctcaagtcactctgagtctttgctggtgtcaacctacaatgcc

SEQ ID NO: 7128 - DNA, 50 bp, Homo sapiens
acctcactatagtagccattaggtaaagatgggccatatccaaatgggct

SEQ ID NO: 7129 - DNA, 50 bp, Homo sapiens
aagaactattcctttgagaatctttcctactgggagttactgctgtgatt

SEQ ID NO: 7130 - DNA, 50 bp, Homo sapiens
tctgtgtgaacatacatacaggactttgattctacctgtgcctgaccatt

SEQ ID NO: 7131 - DNA, 50 bp, Homo sapiens
gtggagctgttggccttgctggatgcgggcactctctacaccttcaggta

SEQ ID NO: 7132 - DNA, 50 bp, Homo sapiens
tgtcagtggctctcactttgtttgaaattgttgctttgggaaaaacacag

SEQ ID NO: 7133 - DNA, 50 bp, Homo sapiens
gatgcagtgggttaggggttgggggtacagactgacttgagctcggagtc

SEQ ID NO: 7134 - DNA, 50 bp, Homo sapiens
tcaggcactcagtaaaggcaagacttgagtgatacataaagtcagttaca

SEQ ID NO: 7135 - DNA, 50 bp, Homo sapiens
ccttgggctgagtttgctggtcctgaagattacagttttggttagagaga

SEQ ID NO: 7136 - DNA, 50 bp, Homo sapiens
acagcaaacaaagtgttccaatcctctattaacccatttaaccaagagtt

SEQ ID NO: 7137 - DNA, 50 bp, Homo sapiens; identical to SEQ ID NO: 6930

SEQ ID NO: 7138 - DNA, 50 bp, Homo sapiens
aagtgtgattagaagcagctggaagtagcagaggaggtggaagttagtcc

SEQ ID NO: 7139 - DNA, 50 bp, Homo sapiens
caggagtaaaacagagctggttgtgtgatacctatgctgggtggaagact

SEQ ID NO: 7140 - DNA, 50 bp, Homo sapiens
ggtgactatcttaccggctcccagtaaactctgaacaatgtaccagctaa

SEQ ID NO: 7141 - DNA, 50 bp, Homo sapiens
gcttgaagatgtctcaacagaaaatcaccgacatgaggaagcatcacgct

SEQ ID NO: 7142 - DNA, 56 bp, Homo sapiens
aggaacatggctgcagcatataaaaagaattgaattccatacttttgttaaccctg

SEQ ID NO: 7143 - DNA, 50 bp, Homo sapiens
ggtgctgccataggtgccagtaatgaccgtttatgcggaaatcaattaca

SEQ ID NO: 7144 - DNA, 50 bp, Homo sapiens
tgaagtactataggactcaatgggaccagtagcagctccaagtggatcac

SEQ ID NO: 7145 - DNA, 50 bp, Homo sapiens
acacgggacctcctttgatctttctgagaattaatagagatttcatggca

SEQ ID NO: 7146 - DNA, 50 bp, Homo sapiens
ccaaaaggagaaagatgactagggtcacacttgaggatttgccaggtggg

SEQ ID NO: 7147 - DNA, 50 bp, Homo sapiens
gcatcttctttgaagacgggaactgtacttcaggttcttttctgtttagc

SEQ ID NO: 7148 - DNA, 50 bp, Homo sapiens
ggctcatttggttttaaagtctcttctatgccatcccaggggaggaggat

SEQ ID NO: 7149 - DNA, 50 bp, Homo sapiens
gactgtggacacctctcactgtgtcttcttggcaggcagagcttactgac

SEQ ID NO: 7150 - DNA, 50 bp, Homo sapiens
gcagggtgcagagcttcacagcaggtaggaagaagtaactaagtggaaac

SEQ ID NO: 7151 - DNA, 50 bp, Homo sapiens
cagctaaagccgtaggtcattgtgactgtccctgggatgtggattactct

SEQ ID NO: 7152 - DNA, 50 bp, Homo sapiens
ccagaatgcagcctacagaccaaatatcaatggacttggtgtagccctgc

SEQ ID NO: 7153 - DNA, 50 bp, Homo sapiens
tttaaaccaggtctggaaaaaggaaggagaggagggcattttagagaaga

SEQ ID NO: 7154 - DNA, 50 bp, Homo sapiens
gtggcttcgtaaaatagaagagcagtcactgtggaactaccaaatggcga

SEQ ID NO: 7155 - DNA, 50 bp, Homo sapiens
cacaccacagctggctgggagcagaggctgctggtctcatagtaatctac

SEQ ID NO: 7156 - DNA, 50 bp, Homo sapiens
tggagaaaatgagagacagacagtgagtgagaaagtcagcgaaaaggaaa

SEQ ID NO: 7157 - DNA, 50 bp, Homo sapiens
acctactgttgagattattcccctgtctccacactgccagaaacttacca

SEQ ID NO: 7158 - DNA, 50 bp, Homo sapiens
ccaaatgatactaggattaagccccaaagcaaagtcaagcaccaccatgg

SEQ ID NO: 7159 - DNA, 50 bp, Homo sapiens
tcccagagcaacaactaagtctcaactaatggacaaccaacacccactga

SEQ ID NO: 7160 - DNA, 50 bp, Homo sapiens
ccacagaatgggcatgtagtattgagatttgaatcatctgctgtccagcc

SEQ ID NO: 7161 - DNA, 50 bp, Homo sapiens
acctcatccggctgctcaagtgcaagcgtgacagcttccccaacttcctg

SEQ ID NO: 7162 - DNA, 50 bp, Homo sapiens
gacctggtgctgtcgccctggcatcttaataaaacctgcttatacttccc

SEQ ID NO: 7163 - DNA, 50 bp, Homo sapiens
gcataaggaagacttgctcccctgtcctatgaaagagaatagttttggag

SEQ ID NO: 7164 - DNA, 50 bp, Homo sapiens
gggactcatctttccctccttggtgattccgcagtgagagagtggctggg

SEQ ID NO: 7165 - DNA, 50 bp, Homo sapiens
agactggatcgcacacctttgcaacagatgtgttctgattctctgaacct

SEQ ID NO: 7166 - DNA, 50 bp, Homo sapiens
aagcaaataccttttacaagtgaaaggaagaatttttcttctgccgtcaa

SEQ ID NO: 7167 - DNA, 50 bp, Homo sapiens
gcaacaaatgcttctattccatagctacggcattgctcagtaagttgagg

SEQ ID NO: 7168 - DNA, 50 bp, Homo sapiens
tccgtgtagaggttacagccttttatgctgttgagctcccaggtaccaaa

SEQ ID NO: 7169 - DNA, 50 bp, Homo sapiens
gcccacttggatttatagtatagcccttcctcgactcccaccagacttgc

SEQ ID NO: 7170 - DNA, 50 bp, Homo sapiens
aagagctcctgagccccctgcccccagagcaataaagtcagctggctttc

SEQ ID NO: 7171 - DNA, 50 bp, Homo sapiens
gctcaacatggaaagaaggtacagaaagtgatgtgttcaaaacattagca

SEQ ID NO: 7172 - DNA, 50 bp, Homo sapiens
ttatataccctggtcccatctttctagggcctggatctgcttatagagca

SEQ ID NO: 7173 - DNA, 50 bp, Homo sapiens
gtttactccgtccctatcactggtgtggctgtgggcaaaccacttattgc

SEQ ID NO: 7174 - DNA, 50 bp, Homo sapiens
gaactgaagcctgcacagtgtccaccctgttcccactcccatctttcttc

SEQ ID NO: 7175 - DNA, 50 bp, Homo sapiens
gaagaccaagagagacaacagacgcagcaaacagccgaagcaccagacaa

SEQ ID NO: 7176 - DNA, 50 bp, Homo sapiens
aattcagaaaattgttgggaggacagcccttttgtgaaccttgtttgggg

SEQ ID NO: 7177 - DNA, 50 bp, Homo sapiens
tttacccagctctgaaggtcattgttcttgcctgtgtttgaataaaatca

SEQ ID NO: 7178 - DNA, 50 bp, Homo sapiens
gtctctgatgctttgtatcattcttgagcaatcgctcggtccgtggacaa

SEQ ID NO: 7179 - DNA, 50 bp, Homo sapiens
ggtaagcccctgagcctgggacctacatgtggtttgcgtaataaaacatt

SEQ ID NO: 7180 - DNA, 50 bp, Homo sapiens
tctggctctgaccggttgatggccttgagcgaatgaaatcatgaaattga

SEQ ID NO: 7181 - DNA, 50 bp, Homo sapiens
tgccctacatagcaattttctgtggcactgagaaaccatgtatgaccaca

SEQ ID NO: 7182 - DNA, 50 bp, Homo sapiens
gcagtgtactgtgtgcaataccaagggcatagctccctgtaatttgggaa

SEQ ID NO: 7183 - DNA, 50 bp, Homo sapiens
ctgagactagggtcccagcacagcccagaaacctttggccacaagaagtg

SEQ ID NO: 7184 - DNA, 50 bp, Homo sapiens
tcgccttccatggtttttaaatgcagtaaataacatttctggatgagact

SEQ ID NO: 7185 - DNA, 50 bp, Homo sapiens
gctttacccccgcaggacatacacaggagcctttgatctcattaaagaga

SEQ ID NO: 7186 - DNA, 50 bp, Homo sapiens
ggaatgtacctctccccaacactgttttgttagcgagcaccttttgacca

SEQ ID NO: 7187 - DNA, 50 bp, Homo sapiens
actcgctcagaagagggaactaagcatttttggcaaccaatgggcagata

SEQ ID NO: 7188 - DNA, 50 bp, Homo sapiens
agctgtgtgaacctctcttattggaaattctgttccgtgtttgtgtaggt

SEQ ID NO: 7189 - DNA, 50 bp, Homo sapiens
agtcccatacatttggaccatggcagctaattttgtaacttaagcattca

SEQ ID NO: 7190 - DNA, 50 bp, Homo sapiens
ctgcccccttcctggacttcgtgccttactgagtctctaagactttttct

SEQ ID NO: 7191 - DNA, 50 bp, Homo sapiens
ggataacatttctcatgaacccactgcccctctgcattttcctcactggt

SEQ ID NO: 7192 - DNA, 50 bp, Homo sapiens
cgcttaagaacattgcctctgggtgtcatgtggaccagacttctgaatag

SEQ ID NO: 7193 - DNA, 50 bp, Homo sapiens
gggttcaatcccttcagctcaggcggaccatttagatttaaattccactt

SEQ ID NO: 7194 - DNA, 50 bp, Homo sapiens
gctcctgccagggctgttaccgttgttttcttgaatcactcacaatgaga

SEQ ID NO: 7195 - DNA, 50 bp, Homo sapiens
aatctggcgaaaccttcgtttgagggactgatgtgagtgtatgtccacct

SEQ ID NO: 7196 - DNA, 50 bp, Homo sapiens
gactatgggctctgaagggggcaggagtcagcaataaagctatgtctgat

SEQ ID NO: 7197 - DNA, 50 bp, Homo sapiens
agggaggggacagatggggagcttttcttacctattcaaggaatacgtgc

SEQ ID NO: 7198 - DNA, 50 bp, Homo sapiens
accttctgaaagctcacagtacacattagtatgtataactggctttacca

SEQ ID NO: 7199 - DNA, 50 bp, Homo sapiens
tttaagggagtcaggaatagatgtatgaacagtcgtgtcactggatgcct

SEQ ID NO: 7200 - DNA, 50 bp, Homo sapiens
cccaccttccacctcttagcactggtgaccccaaaaatgaaaccatcaat

SEQ ID NO: 7201 - DNA, 50 bp, Homo sapiens
agaccagcagtgtttaaatctaaatacgttgtgagtctgttatctgtcct

SEQ ID NO: 7202 - DNA, 50 bp, Homo sapiens
acctcgacctcagagcctcccacccagaagatcctgcttccgtggttgag

SEQ ID NO: 7203 - DNA, 50 bp, Homo sapiens
gggcagtgggtcccagattggctcacactgagaatgtaagaactacaaac

SEQ ID NO: 7204 - DNA, 50 bp, Homo sapiens
tggccttaagttttctaattcaagcgggtttttggaaaaatttatggtct

SEQ ID NO: 7205 - DNA, 50 bp, Homo sapiens
tgcagagttataagccccaaacaggtcatgctccaataaaaatgattcta

SEQ ID NO: 7206 - DNA, 50 bp, Homo sapiens
ccaaacaatgatgtggattcttttgcacagaaatatttaaggtgggatgg

SEQ ID NO: 7207 - DNA, 50 bp, Homo sapiens
acaaaagtcaactgttgtctcttttcaaaccaaattgggagaattgttgc

SEQ ID NO: 7208 - DNA, 50 bp, Homo sapiens
gctggggactctagcctctgtgttcataaagacattaagaagtggatgga

SEQ ID NO: 7209 - DNA, 50 bp, Homo sapiens
ggagaatgacacatcaagctgctaacaattgggggaaggggaaggaagaa

SEQ ID NO: 7210 - DNA, 50 bp, Homo sapiens
acctgggtttaatacagctcacatcactgaatgttacacatgagtttaaa

SEQ ID NO: 7211 - DNA, 50 bp, Homo sapiens
cttaaggacgcctttgcctggcccctttattacagcccaacacggtaggc

SEQ ID NO: 7212 - DNA, 50 bp, Homo sapiens
tccatcagtgccatttcctgtagaactaaaggctgttccaagaatgtggg

SEQ ID NO: 7213 - DNA, 50 bp, Homo sapiens
atctgtaaagcactcagaaggcagccatccctagatgttggtttcatgta

SEQ ID NO: 7214 - DNA, 50 bp, Homo sapiens
tggttagattgttttcacttggtgatcatgtcttttccatgtgtacctgt

SEQ ID NO: 7215 - DNA, 50 bp, Homo sapiens
catgtcccttgaaacatgatagttacatacacagttttctctccacacat

SEQ ID NO: 7216 - DNA, 50 bp, Homo sapiens
aggtttcacatgaacctgttctaggctgtggacattggtgtggagaggtt

SEQ ID NO: 7217 - DNA, 50 bp, Homo sapiens
gacacttggggtccacaatcccaggtccatactctaggttttggatacca

SEQ ID NO: 7218 - DNA, 50 bp, Homo sapiens
agaaatgatttgcagctgagtgaatcaggaagtgacagtgatgactgaag

SEQ ID NO: 7219 - DNA, 50 bp, Homo sapiens
tcctgagagatggacaatgaaatatcagttggtggatatgtgtgatagct

SEQ ID NO: 7220 - DNA, 50 bp, Homo sapiens
ctttcagggcaggcagctgtgcatgttctctcaactaaaggtcttgtgag

SEQ ID NO: 7221 - DNA, 50 bp, Homo sapiens
gctggacacacggtgagattttctcgtatgtaaataaaaggcaatttggt

SEQ ID NO: 7222 - DNA, 50 bp, Homo sapiens
ctcaacgaaaggctcacactaacaggggaggattacagcaccacaatact

SEQ ID NO: 7223 - DNA, 50 bp, Homo sapiens
ccacactgaacccaattacacacagcgggagaacgcagtaaacagctttc

SEQ ID NO: 7224 - DNA, 50 bp, Homo sapiens
aggccctggaaaattttgtgcttccaacgtggccttcaattcttgctttt

SEQ ID NO: 7225 - DNA, 50 bp, Homo sapiens
tattaagcttgcccaggctcctgttcatgaaggttcccccagcggtggcc

SEQ ID NO: 7226 - DNA, 50 bp, Homo sapiens
gctataccactgactgtattgaaaaccaaagtattaagaggggaaacgcc

SEQ ID NO: 7227 - DNA, 50 bp, Homo sapiens
tcggggtcagttaagcctcagtattcttagcttttgttgattttggcact

SEQ ID NO: 7228 - DNA, 50 bp, Homo sapiens
atggtgcaaaccctggaacagtatgaattctgctacaaagtggtacaaga

SEQ ID NO: 7229 - DNA, 50 bp, Homo sapiens
agaagcagcgagtgcatgggctaattatcatcaatctttatgtatttgtt

SEQ ID NO: 7230 - DNA, 50 bp, Homo sapiens
ggaaatgttgctgtgggggattcattgtaactctccttgtgaactgctca

SEQ ID NO: 7231 - DNA, 50 bp, Homo sapiens
atgccaaattcctgacacgtggcgtttgaaaataccatggaacgtttcca

SEQ ID NO: 7232 - DNA, 50 bp, Homo sapiens
acattctgactccatctgcggcctcattaaggtgatagaaacatactagg

SEQ ID NO: 7233 - DNA, 50 bp, Homo sapiens
atgataatgttggcatctgtgataaactatcaatgaggctcccatcatgc

SEQ ID NO: 7234 - DNA, 50 bp, Homo sapiens
agagtcacatgtagaaaagcctccagtattaagctcctgaattcattcct

SEQ ID NO: 7235 - DNA, 50 bp, Homo sapiens
atggcaacaatgctgacagcaagcagtagatcctctgattccaattacca

SEQ ID NO: 7236 - DNA, 50 bp, Homo sapiens
gggaaccctcattaattagacaagaacaccaaggctatgaccacagcagc

SEQ ID NO: 7237 - DNA, 50 bp, Homo sapiens
ggctcaccagagtacccagaagaatcagtatggaattagaggacagtggc

SEQ ID NO: 7238 - DNA, 50 bp, Homo sapiens
attccaggccctcagtctttggcaatggccaccctggtgttggcatattg

SEQ ID NO: 7239 - DNA, 50 bp, Homo sapiens
gcatacataaaggcaaagaatgacaaaaggcttaatccacctagaagaca

SEQ ID NO: 7240 - DNA, 50 bp, Homo sapiens
atatagtgggagacaaaacacaggaggcgggggatatcatgtagcagagc

SEQ ID NO: 7241 - DNA, 50 bp, Homo sapiens
tctaatgtgccttggatatgtgccaaatgatggaaaagaaacagtaaact

SEQ ID NO: 7242 - DNA, 50 bp, Homo sapiens
gcttggctcatctggggtttgctgggcttaacacccaataaagaactttg

SEQ ID NO: 7243 - DNA, 50 bp, Homo sapiens
ctgcggttttggaaccttacctctcctccttagcccaatatgctgtcttg

SEQ ID NO: 7244 - DNA, 50 bp, Homo sapiens
tccaggccattttgcagggactctgaagtgacctttagtagtaatagtct

SEQ ID NO: 7245 - DNA, 50 bp, Homo sapiens
tggcagccaggaactgagtatgacaatgttgtactaaagaaaggcccaaa

SEQ ID NO: 7246 - DNA, 50 bp, Homo sapiens
agagagagacatatcacgctgctgtcatgattttgtgtcaagatgatcca

SEQ ID NO: 7247 - DNA, 50 bp, Homo sapiens
cttctggggacctttcctacccccatcagcatcaataaaacctcctgtct

SEQ ID NO: 7248 - DNA, 50 bp, Homo sapiens
tagatgatttctagcaggcaggaagtcctgtgcggtgtcaccatgagcac

SEQ ID NO: 7249 - DNA, 50 bp, Homo sapiens
ccatggtctggggcttgaggaagatgagtttgttgatttaaataaagaat

SEQ ID NO: 7250 - DNA, 50 bp, Homo sapiens
aggtcaagggcttactatttctgggtcttttgctactaagttcacattag

SEQ ID NO: 7251 - DNA, 50 bp, Homo sapiens
tttctggggacctcttgaattacatgctgtaacatatgaagtgatgtggt

SEQ ID NO: 7252 - DNA, 50 bp, Homo sapiens
tggcacaaaacctcctcctcccaggcactcatttatattgctctgaaaga

SEQ ID NO: 7253 - DNA, 50 bp, Homo sapiens
tgaggtcactgccacttctcacatgctgcttaagggagcacaaataaagg

SEQ ID NO: 7254 - DNA, 50 bp, Homo sapiens
cacgctaccccctgccttgggaggtgtgtggaataaattatttttgttaa

SEQ ID NO: 7255 - DNA, 50 bp, Homo sapiens
aatgcagagaatggaaagtagcgcatccctgaggctggactccagatctg

SEQ ID NO: 7256 - DNA, 50 bp, Homo sapiens
gtggcacaccactccttccagcagtagtcgctttactgttacctgtttag

SEQ ID NO: 7257 - DNA, 50 bp, Homo sapiens
agcaacagtattctgcatggttcactgcttaagaaaatgccttctggaat

SEQ ID NO: 7258 - DNA, 50 bp, Homo sapiens
aaacatgtccctggagagtagcctgctcccacactgtcactggatgtcat

SEQ ID NO: 7259 - DNA, 50 bp, Homo sapiens
cagttgcagcctcttgacctcggataacaataagagagctcatctcattt

SEQ ID NO: 7260 - DNA, 50 bp, Homo sapiens
tgggcttggtcttccagttggcatttgcctgaagttgtattgaaacaatt

SEQ ID NO: 7261 - DNA, 50 bp, Homo sapiens
ttctgccgtgtgtatccccaacccttgacccaatgacaccaaacacagtg

SEQ ID NO: 7262 - DNA, 50 bp, Homo sapiens
tgtgtgcgacagggaggaagtttcaataaagcaacaacaagcttcaagga

SEQ ID NO: 7263 - DNA, 50 bp, Homo sapiens
ctccccttgggcggctgagagccccagctgacatggaaatacagttgttg

SEQ ID NO: 7264 - DNA, 50 bp, Homo sapiens
ctccaccacctgaccagagtgttctcttcagaggactggctcctttccca

SEQ ID NO: 7265 - DNA, 50 bp, Homo sapiens
ctctgccctcctgtcacccagtagagtaaataaacttccttggctcctaa

SEQ ID NO: 7266 - DNA, 50 bp, Homo sapiens
aaattccagccttgactttcttctgtgcacctgatgggagggtaatgtct

SEQ ID NO: 7267 - DNA, 50 bp, Homo sapiens
ctgtaggccagggtggaatgaagtcagctcctttttatagttgaaataca

SEQ ID NO: 7268 - DNA, 50 bp, Homo sapiens
ttggcgggccatcccaacaggtgatgaccccacaaggaagaggtactgtt

SEQ ID NO: 7269 - DNA, 50 bp, Homo sapiens
ggaagatggaaataaacctgcgtgtgggtggagtgttctcgtgccgaatt

SEQ ID NO: 7270 - DNA, 50 bp, Homo sapiens
agtgaggacaatgtggcttgctcctttttgaatctacagataatgcatgt

SEQ ID NO: 7271 - DNA, 50 bp, Homo sapiens
gagggtgggggagggaggtggagggagggaagggtttctctattaaaatg

SEQ ID NO: 7272 - DNA, 50 bp, Homo sapiens
tgctgactgtagctttggaagtttagctctgagaaccgtagatgatttca

SEQ ID NO: 7273 - DNA, 50 bp, Homo sapiens
gattgaggaaggtccgcacagcctgtctctgctcagttgcaataaacgtg

SEQ ID NO: 7274 - DNA, 50 bp, Homo sapiens
gattcttgtctggctaataaatcatcaccaactgccttctcctacaggga

SEQ ID NO: 7275 - DNA, 50 bp, Homo sapiens
agattcttagggcacgtttgttccccttggagggttttccacacggagtc

SEQ ID NO: 7276 - DNA, 50 bp, Homo sapiens
gccatactctggctgcctctttgccttcctaggggcattttctttaactt

SEQ ID NO: 7277 - DNA, 50 bp, Homo sapiens
tgcctcttatctacttgagagcaacatgtcttttcaatcatgggattgac

SEQ ID NO: 7278 - DNA, 50 bp, Homo sapiens
tggacctgtgacattctggactatttctgtgtttatttgtggccgagtgt

SEQ ID NO: 7279 - DNA, 50 bp, Homo sapiens
tgaaggtgtctgtgacctctttgatgtgcctgttctcaacctctgactga

SEQ ID NO: 7280 - DNA, 50 bp, Homo sapiens
cctggagtccctgaataaagataagaagcatcactgaagataatacctgg

SEQ ID NO: 7281 - DNA, 50 bp, Homo sapiens
ttgtcccgaagatttgcgcctttagtgccttttgaggggttcccatcatc

SEQ ID NO: 7282 - DNA, 50 bp, Homo sapiens
ctgctaggctctgcccaccggccaccaacactcctgtaattccaataaag

SEQ ID NO: 7283 - DNA, 50 bp, Homo sapiens
ttaaaatactgtcattggttgggaggggattgcattaaatgattagtcca

SEQ ID NO: 7284 - DNA, 50 bp, Homo sapiens
ctcacacacgcaggcgacagtcagaacaaacaggaacaaagctacaacac

SEQ ID NO: 7285 - DNA, 50 bp, Homo sapiens
tgaatagtgtgcagactcacagataataaagctcagagcagctcccggca

SEQ ID NO: 7286 - DNA, 50 bp, Homo sapiens
cccagtgcttcacgaagttaaaggaaagatctgctggtagtgtttagtct

SEQ ID NO: 7287 - DNA, 50 bp, Homo sapiens
cgagccgaccatgtcttcatttgcttccacaagaaccgcgaggacagagc

SEQ ID NO: 7288 - DNA, 50 bp, Homo sapiens
ttttccccctttagtctcctggctttttcctttcccttcccttctccact

SEQ ID NO: 7289 - DNA, 50 bp, Homo sapiens
aacccgttgtggaaattattggaattaactgagccaaagtgattatgcat

SEQ ID NO: 7290 - DNA, 50 bp, Homo sapiens
gcccccgatcctacaccctgagcctcagagcactgctactttttaaaata

SEQ ID NO: 7291 - DNA, 50 bp, Homo sapiens
aagcgtctcatggagttcggactggttggggtgataatatttgtttcttt

SEQ ID NO: 7292 - DNA, 50 bp, Homo sapiens
aagccaggctttgggatacaagttctttcctcttcatttgatgccgtgca

SEQ ID NO: 7293 - DNA, 50 bp, Homo sapiens
agctgtcaccactacagtaagctggtttacagatgttttccactgagcat

SEQ ID NO: 7294 - DNA, 50 bp, Homo sapiens
tgaaggtacatcgtttgcaaatgtgagtttcctctcctgtccgtgtttgt

SEQ ID NO: 7295 - DNA, 50 bp, Homo sapiens
ggatacaaactggtattctgttctggaggaaagggaggagtggaggtggg

SEQ ID NO: 7296 - DNA, 50 bp, Homo sapiens
ctgccgctgcccagccacatcccttggttttgtattttatttacagagtt

SEQ ID NO: 7297 - DNA, 50 bp, Homo sapiens
tgcagtagacgatacaggttgcatgtggacactcagtcacattaacaact

SEQ ID NO: 7298 - DNA, 50 bp, Homo sapiens
ccccaaccacaggcatcaggcaaccatttgaaataaaactccttcagcct

SEQ ID NO: 7299 - DNA, 50 bp, Homo sapiens
gtactgaggtgactggtatagtctgatgagaaagatgtggattgccataa

SEQ ID NO: 7300 - DNA, 50 bp, Homo sapiens
cacttgttcaatcatggaactttctagaacgctgccactcttcaaaggct

SEQ ID NO: 7301 - DNA, 50 bp, Homo sapiens
tcatcacagtgtggtaaggttgcaaattcaaaacatgtcacccaagctct

SEQ ID NO: 7302 - DNA, 50 bp, Homo sapiens
acaacctgatcattgaagccaactttgtcccagcacattccttaagtcct

SEQ ID NO: 7303 - DNA, 50 bp, Homo sapiens
acttgattaggctccggttttcctttggcttctgcttttcagtgaatggc

SEQ ID NO: 7304 - DNA, 50 bp, Homo sapiens
ttgcagacaaattcctctgagcttagctaggagttcattatgcttcctgt

SEQ ID NO: 7305 - DNA, 50 bp, Homo sapiens
acagtagcttagcatcagaggtttgcttcctcagtaacatttctgttctc

SEQ ID NO: 7306 - DNA, 50 bp, Homo sapiens
atgtgagccagagcatgttgcagcaaatctattgtttgtaaaaataacaa

SEQ ID NO: 7307 - DNA, 50 bp, Homo sapiens
tttgtgccatgtggctacattagttgatgtttatcgagttcattggtcaa

SEQ ID NO: 7308 - DNA, 50 bp, Homo sapiens
agcccaaccattaaaaatttaatacaacttggtttctccccctttttcct

SEQ ID NO: 7309 - DNA, 50 bp, Homo sapiens
gcaaagaaagaagaatccgaggagtctgatgatgacatgggctttggtct

SEQ ID NO: 7310 - DNA, 50 bp, Homo sapiens; identical to SEQ ID NO: 6184

SEQ ID NO: 7311 - DNA, 50 bp, Homo sapiens
ttttcctgaccaagactgagggatgggctggaggttttcaactttgctac

SEQ ID NO: 7312 - DNA, 50 bp, Homo sapiens
tctgggactgggcaaatgtttgtgtggcctccttaaactagctgttatgt

SEQ ID NO: 7313 - DNA, 50 bp, Homo sapiens
aacctaaacgtatttcactaactctggctccttctccataaagcacattt

SEQ ID NO: 7314 - DNA, 50 bp, Homo sapiens
ccaccaaatgcatgtcatgtattctcaataggctgtattcccagcagtca

SEQ ID NO: 7315 - DNA, 50 bp, Homo sapiens
tgtacaggtagctaactttgtaaacgctgtgtattccctctgcccccatg

SEQ ID NO: 7316 - DNA, 50 bp, Homo sapiens
tctcatcatttcgaagatagcagagtcatagttgggcacccagtgattgg

SEQ ID NO: 7317 - DNA, 50 bp, Homo sapiens
caacaaggtggaaacaagggctggagctgcgtttgttttgccatcactat

SEQ ID NO: 7318 - DNA, 50 bp, Homo sapiens
gagcattcctcaggggaggtcacctgtgaggttcccagaactgtagtttt

SEQ ID NO: 7319 - DNA, 50 bp, Homo sapiens
tgcaggtgttgacaagatccgccatctgtaatgtccttggcacaataaaa

SEQ ID NO: 7320 - DNA, 50 bp, Homo sapiens
aagagtctgacttctcactaggagcatgtctgttgtacttacttcaaaca

SEQ ID NO: 7321 - DNA, 50 bp, Homo sapiens
caaacaccaaaccaagataacaccggaacgataaacagcagaaacagaga

SEQ ID NO: 7322 - DNA, 50 bp, Homo sapiens
tgggtttgtccagttcaggctagatgtgcatcatggcaggaagaaagaag

SEQ ID NO: 7323 - DNA, 50 bp, Homo sapiens
aaggatgttccttcaggaggaagcagcactaaaagcactctgagtcaaga

SEQ ID NO: 7324 - DNA, 50 bp, Homo sapiens
cggaagccaccgtgtggttctttcacaggcacgtttattttgctgaaata

SEQ ID NO: 7325 - DNA, 50 bp, Homo sapiens
cctccactcagctgtcctgcagcaaacactccaccctccaccttccattt

SEQ ID NO: 7326 - DNA, 50 bp, Homo sapiens
tccctccttccagtgttccttagaacagacatttaggtatctcaggtcct

SEQ ID NO: 7327 - DNA, 50 bp, Homo sapiens
cagccgcagcatctaaacgaacaacagaggagaacgacgaggacagagtt

SEQ ID NO: 7328 - DNA, 50 bp, Homo sapiens
tcactggatttctgtgtcttcactagaacaccattgtcatctcatattga

SEQ ID NO: 7329 - DNA, 50 bp, Homo sapiens
gcttctctcgcacccccagcacctctgtcccaaaacctcattcccttttt

SEQ ID NO: 7330 - DNA, 50 bp, Homo sapiens
agctgctcacagacaccagcaaagcaatgtgctcctgatcaagtagattt

SEQ ID NO: 7331 - DNA, 50 bp, Homo sapiens
atgctcatgtggtgtccccaccgcccacttgtttgatgtcactgactgtc

SEQ ID NO: 7332 - DNA, 50 bp, Homo sapiens
gctgagtgtgtcgctccctggtccactgtttctcctataaatgtaaatgg

SEQ ID NO: 7333 - DNA, 50 bp, Homo sapiens
tgcagcacattgataagatggtttccgtgagctatgataagattgaaatt

SEQ ID NO: 7334 - DNA, 50 bp, Homo sapiens
ataaatatgcagtgatatggcagaagacaccagagcagatgcagagagcc

SEQ ID NO: 7335 - DNA, 50 bp, Homo sapiens
ttgaaccgggaagtgggaggacgtagagcagagaagagaacatttttaaa

SEQ ID NO: 7336 - DNA, 50 bp, Homo sapiens
tttgctcattctaaactcaagcttttaagcctcacagaatttacaggggt

SEQ ID NO: 7337 - DNA, 50 bp, Homo sapiens
gccataggcttacatggggcatactcgttacacagtcagaatgtttgaaa

SEQ ID NO: 7338 - DNA, 50 bp, Homo sapiens
ggtctctcgctctgtctttccagcatccactctcccttgtccttctgggg

SEQ ID NO: 7339 - DNA, 50 bp, Homo sapiens
tcagcaccaagtcatgtttaaaagaccagagagacaagcattttgccaag

SEQ ID NO: 7340 - DNA, 50 bp, Homo sapiens
cgaaccctgtctagaaggaatgtatttgttgctaaatttcgtagcactgt

SEQ ID NO: 7341 - DNA, 50 bp, Homo sapiens
caaatggccttggtcccgcagcttgtgtgcgtgagtgcagtgtgagtgtg

SEQ ID NO: 7342 - DNA, 50 bp, Homo sapiens
ctcttggaaagacttctctgccatccctttgcacctgagaggggaagttc

SEQ ID NO: 7343 - DNA, 50 bp, Homo sapiens
ggcgcggtgacccacttatgggacttggcctttctttgttgtttgtttaa

SEQ ID NO: 7344 - DNA, 52 bp, Homo sapiens
acccagttcatgattacttctactcttaacactcaatccccctaattaaacc

SEQ ID NO: 7345 - DNA, 50 bp, Homo sapiens
ttcgataaacagcgttgacttgcttgtaccacttaagagttgtgagtgct

SEQ ID NO: 7346 - DNA, 50 bp, Homo sapiens
tccagaactttgtctatcactctccccaacaacctagatgtgaaaacaga

SEQ ID NO: 7347 - DNA, 50 bp, Homo sapiens
gggatctttcaaatggatagtgagttgccttttcctataggtgacaatca

SEQ ID NO: 7348 - DNA, 50 bp, Homo sapiens
agagcaagcattacagaaaataggtctggaagacaggaaaaggacaaaga

SEQ ID NO: 7349 - DNA, 50 bp, Homo sapiens
atgtgtcctgcccctcagctctttgccttatctgtgtcactgtcacttta

SEQ ID NO: 7350 - DNA, 50 bp, Homo sapiens
tcctgtgaattgaatttctcttcaatcaaagtgccccaaacagaagcaca

SEQ ID NO: 7351 - DNA, 50 bp, Homo sapiens
aggtcccctgcctggtacaaagaaaagcaaaaagaatttacgaagattgt

SEQ ID NO: 7352 - DNA, 50 bp, Homo sapiens
gccagaagcataatttaccagagacgagaacagggtgtgggagagaggaa

SEQ ID NO: 7353 - DNA, 50 bp, Homo sapiens
tctttcttccctcgtgacagtggtgtgtggtgtcgtctgtgaatgctaag

SEQ ID NO: 7354 - DNA, 50 bp, Homo sapiens
cagtcaaacattttaccttgtgccttggctcactctgtgccttttctcca

SEQ ID NO: 7355 - DNA, 50 bp, Homo sapiens
acaggaaacgggctttctctgaattggtaaatgggaaagaagtgagcaac

SEQ ID NO: 7356 - DNA, 50 bp, Homo sapiens; identical to SEQ ID NO: 4610

SEQ ID NO: 7357 - DNA, 50 bp, Homo sapiens
accctcgccacaagattctgcaatctcctaaagtacagatgagaaaggaa

SEQ ID NO: 7358 - DNA, 50 bp, Homo sapiens
tgccaaggggttaatgaaacaaatagctgttgacgtttgctcatttaaga

SEQ ID NO: 7359 - DNA, 50 bp, Homo sapiens
cagtggcacaccttaaccagtcactaattttcactgttgtgaaagtgatt

SEQ ID NO: 7360 - DNA, 50 bp, Homo sapiens
cccagtgccacagagaagacgggatttgaagctgtacccaatttaattcc

SEQ ID NO: 7361 - DNA, 50 bp, Homo sapiens
tgagccctactccctgcagatgccaccctagccaatgtctcctccccttc

SEQ ID NO: 7362 - DNA, 50 bp, Homo sapiens
gcagggaggggaggataagtgggatctaccaattgattctggcaaaacaa

SEQ ID NO: 7363 - DNA, 50 bp, Homo sapiens
ggccactacctttgttggaaacaaagcataagggagtgaaagtgtctaaa

SEQ ID NO: 7364 - DNA, 50 bp, Homo sapiens
gctggcccgatctctccccacagttgcaagaagcattttcaaagaatagt

SEQ ID NO: 7365 - DNA, 50 bp, Homo sapiens
attgggatgaaactactttagcaaagtccacagatcagaaaccagacggt

SEQ ID NO: 7366 - DNA, 50 bp, Homo sapiens
aggagactgggtgctataattagattattttgaggcagacagagagctgt

SEQ ID NO: 7367 - DNA, 50 bp, Homo sapiens
agcctgcaaggttaggacttgaagagggaaggtatttaataactgggcga

SEQ ID NO: 7368 - DNA, 50 bp, Homo sapiens
ttagtgcagttggaatgaatgtgtataggtcagaggtcttcgtgttcaca

SEQ ID NO: 7369 - DNA, 50 bp, Homo sapiens
tcacctctcagttgaaagatttcttctttgaaaggtcaagaccgtgaact

SEQ ID NO: 7370 - DNA, 50 bp, Homo sapiens
agtctggatgtaaggcctgcctcaaagagacactaatgggagggaacaaa

SEQ ID NO: 7371 - DNA, 50 bp, Homo sapiens
aaaggaagaagcacgatgcaaacagaaacaagacgagacagagtgagcga

SEQ ID NO: 7372 - DNA, 50 bp, Homo sapiens
actgcttcaagtcttgacccctttgtgtctaatagctaaacaaacatgtg

SEQ ID NO: 7373 - DNA, 50 bp, Homo sapiens
aacaataggaataaggttacttcagccttaaggggcttatcatactgctg

SEQ ID NO: 7374 - DNA, 50 bp, Homo sapiens
gacagggaaatctgcctaccaagaggggtgtgtgtgtctttgtgcccaca

SEQ ID NO: 7375 - DNA, 50 bp, Homo sapiens
aacaagtccatgactcccaagggtttaaggaccaatggttcagtgagaca

SEQ ID NO: 7376 - DNA, 50 bp, Homo sapiens
acactcatactcatatgtacgtgctcagtcgaacggactgcagtccgttc

SEQ ID NO: 7377 - DNA, 50 bp, Homo sapiens
tactgctatggaatgagaccaccacttctcctgttgtccttcccagcttc

SEQ ID NO: 7378 - DNA, 50 bp, Homo sapiens
tgccaagtgaggacaaactgctaggctgtatcccataatttcaggatgag

SEQ ID NO: 7379 - DNA, 50 bp, Homo sapiens
aaaccgaccgcctgtaggctcctggaactatacagataggtaaagagttc

SEQ ID NO: 7380 - DNA, 50 bp, Homo sapiens
gaccaatcatcagactccttgaactcccccactctgctggctctgtaacc

SEQ ID NO: 7381 - DNA, 50 bp, Homo sapiens
agagatccaggtgcaagtggattgagacagcagcaacagctcaagagata

SEQ ID NO: 7382 - DNA, 50 bp, Homo sapiens
atgtccctttctcctctcccctcttcctcttactgctgttctccctttct

SEQ ID NO: 7383 - DNA, 50 bp, Homo sapiens
acatccatagaacaatacatcaaagttgttgaagtgttgcaggggagggc

SEQ ID NO: 7384 - DNA, 50 bp, Homo sapiens
agcacttactgtcaggcattcagaatgtgagcaatgacaataatttacct

SEQ ID NO: 7385 - DNA, 50 bp, Homo sapiens
aatctgattgagtctccactccacaagcactcagggttccccagcagctc

SEQ ID NO: 7386 - DNA, 50 bp, Homo sapiens
aacccaagaaaagagttgctcttactatctactgctgactcttgaacttt

SEQ ID NO: 7387 - DNA, 50 bp, Homo sapiens
ttcgtaggtgggcttttcctatcagagcttggctcataaccaaataaagt

SEQ ID NO: 7388 - DNA, 50 bp, Homo sapiens
aggtgggctggacttctacctgccctcaagggtgtgtatattgtataggg

SEQ ID NO: 7389 - DNA, 50 bp, Homo sapiens
tgtgtcagaatggcactagttcagtttatgtcccttctgatatagtagct

SEQ ID NO: 7390 - DNA, 50 bp, Homo sapiens
ctatcagccccaagtggagcagaacagagggatttgggaggaatgtcctc

SEQ ID NO: 7391 - DNA, 50 bp, Homo sapiens
tgctaaggagaggggccatgaagagttttgttgagaacatcgtgtctgag

SEQ ID NO: 7392 - DNA, 50 bp, Homo sapiens
agtcagaacttcaagtccccattaaaggggctggaaaatacaagtacagt

SEQ ID NO: 7393 - DNA, 50 bp, Homo sapiens
ctccccttcctgcacccgtacccccgtggtctttgaataaagtctgagtg

SEQ ID NO: 7394 - DNA, 50 bp, Homo sapiens
cagatggttgtggggtcaagtacatccccagtcgtggccctttggacaag

SEQ ID NO: 7395 - DNA, 50 bp, Homo sapiens
ttttggcctgtttgatgtatgtgtgaaacaatgttgtccaacaataaaca

SEQ ID NO: 7396 - DNA, 50 bp, Homo sapiens
agcctaggtgacagagcaagactccatttcaaaaacaaaacaaaacaaaa

SEQ ID NO: 7397 - DNA, 50 bp, Homo sapiens
acactgagaatacacgacatacacgcacgcacaagacaacaacagacagc

SEQ ID NO: 7398 - DNA, 50 bp, Homo sapiens; identical to SEQ ID NO: 6714

SEQ ID NO: 7399 - DNA, 50 bp, Homo sapiens; identical to SEQ ID NO: 6715

SEQ ID NO: 7400 - DNA, 50 bp, Homo sapiens; identical to SEQ ID NO: 6716

SEQ ID NO: 7401 - DNA, 50 bp, Homo sapiens; identical to SEQ ID NO: 6717

SEQ ID NO: 7402 - DNA, 50 bp, Homo sapiens; identical to SEQ ID NO: 6718

SEQ ID NO: 7403 - DNA, 50 bp, Homo sapiens; identical to SEQ ID NO: 6719

SEQ ID NO: 7404 - DNA, 50 bp, Homo sapiens; identical to SEQ ID NO: 6720

SEQ ID NO: 7405 - DNA, 50 bp, Homo sapiens; identical to SEQ ID NO: 6721

SEQ ID NO: 7406 - DNA, 50 bp, Homo sapiens; identical to SEQ ID NO: 6722

SEQ ID NO: 7407 - DNA, 50 bp, Homo sapiens; identical to SEQ ID NO: 6723

SEQ ID NO: 7408 - DNA, 50 bp, Homo sapiens; identical to SEQ ID NO: 6724

SEQ ID NO: 7409 - DNA, 50 bp, Homo sapiens; identical to SEQ ID NO: 6725

SEQ ID NO: 7410 - DNA, 50 bp, Homo sapiens; identical to SEQ ID NO: 6726

SEQ ID NO: 7411 - DNA, 50 bp, Homo sapiens; identical to SEQ ID NO: 6727

SEQ ID NO: 7412 - DNA, 50 bp, Homo sapiens; identical to SEQ ID NO: 6728

SEQ ID NO: 7413 - DNA, 50 bp, Homo sapiens; identical to SEQ ID NO: 6729

SEQ ID NO: 7414 - DNA, 50 bp, Homo sapiens; identical to SEQ ID NO: 6730

SEQ ID NO: 7415 - DNA, 50 bp, Homo sapiens; identical to SEQ ID NO: 6731

SEQ ID NO: 7416 - DNA, 50 bp, Homo sapiens; identical to SEQ ID NO: 6732

SEQ ID NO: 7417 - DNA, 50 bp, Homo sapiens; identical to SEQ ID NO: 6733

SEQ ID NO: 7418 - DNA, 50 bp, Homo sapiens; identical to SEQ ID NO: 6734

SEQ ID NO: 7419 - DNA, 50 bp, Homo sapiens; identical to SEQ ID NO: 6735

SEQ ID NO: 7420 - DNA, 50 bp, Homo sapiens; identical to SEQ ID NO: 6736

SEQ ID NO: 7421 - DNA, 50 bp, Homo sapiens; identical to SEQ ID NO: 6737

SEQ ID NO: 7422 - DNA, 50 bp, Homo sapiens; identical to SEQ ID NO: 6738

SEQ ID NO: 7423 - DNA, 50 bp, Homo sapiens; identical to SEQ ID NO: 4953

SEQ ID NO: 7424 - DNA, 50 bp, Homo sapiens; identical to SEQ ID NO: 6740

SEQ ID NO: 7425 - DNA, 50 bp, Homo sapiens; identical to SEQ ID NO: 6741

SEQ ID NO: 7426 - DNA, 50 bp, Homo sapiens; identical to SEQ ID NO: 6742

SEQ ID NO: 7427 - DNA, 50 bp, Homo sapiens; identical to SEQ ID NO: 6743

SEQ ID NO: 7428 - DNA, 50 bp, Homo sapiens; identical to SEQ ID NO: 6744

SEQ ID NO: 7429 - DNA, 50 bp, Homo sapiens; identical to SEQ ID NO: 6745

SEQ ID NO: 7430 - DNA, 50 bp, Homo sapiens; identical to SEQ ID NO: 6746

SEQ ID NO: 7431 - DNA, 50 bp, Homo sapiens; identical to SEQ ID NO: 6540

SEQ ID NO: 7432 - DNA, 50 bp, Homo sapiens; identical to SEQ ID NO: 6748

SEQ ID NO: 7433 - DNA, 50 bp, Homo sapiens; identical to SEQ ID NO: 6749

SEQ ID NO: 7434 - DNA, 50 bp, Homo sapiens; identical to SEQ ID NO: 6750

SEQ ID NO: 7435 - DNA, 50 bp, Homo sapiens; identical to SEQ ID NO: 6751

SEQ ID NO: 7436 - DNA, 56 bp, Homo sapiens
acaaaagtatggaattcaattctttttatatgctgcagccatgttcctgccctaga

SEQ ID NO: 7437 - DNA, 50 bp, Homo sapiens; identical to SEQ ID NO: 6753

SEQ ID NO: 7438 - DNA, 50 bp, Homo sapiens; identical to SEQ ID NO: 6754

SEQ ID NO: 7439 - DNA, 50 bp, Homo sapiens; identical to SEQ ID NO: 6755

SEQ ID NO: 7440 - DNA, 50 bp, Homo sapiens; identical to SEQ ID NO: 6756

SEQ ID NO: 7441 - DNA, 50 bp, Homo sapiens; identical to SEQ ID NO: 6757

SEQ ID NO: 7442 - DNA, 50 bp, Homo sapiens; identical to SEQ ID NO: 6758

SEQ ID NO: 7443 - DNA, 50 bp, Homo sapiens; identical to SEQ ID NO: 6759

SEQ ID NO: 7444 - DNA, 50 bp, Homo sapiens; identical to SEQ ID NO: 6760

SEQ ID NO: 7445 - DNA, 50 bp, Homo sapiens; identical to SEQ ID NO: 6761

SEQ ID NO: 7446 - DNA, 50 bp, Homo sapiens; identical to SEQ ID NO: 6762

SEQ ID NO: 7447 - DNA, 50 bp, Homo sapiens; identical to SEQ ID NO: 6763

SEQ ID NO: 7448 - DNA, 50 bp, Homo sapiens; identical to SEQ ID NO: 6764

SEQ ID NO: 7449 - DNA, 50 bp, Homo sapiens; identical to SEQ ID NO: 6765

SEQ ID NO: 7450 - DNA, 50 bp, Homo sapiens; identical to SEQ ID NO: 6766

SEQ ID NO: 7451 - DNA, 50 bp, Homo sapiens; identical to SEQ ID NO: 6767

SEQ ID NO: 7452 - DNA, 50 bp, Homo sapiens; identical to SEQ ID NO: 6768

SEQ ID NO: 7453 - DNA, 50 bp, Homo sapiens; identical to SEQ ID NO: 6769

SEQ ID NO: 7454 - DNA, 50 bp, Homo sapiens; identical to SEQ ID NO: 6770

SEQ ID NO: 7455 - DNA, 50 bp, Human cytomegalovirus; identical to SEQ ID NO: 4173

SEQ ID NO: 7456 - DNA, 50 bp, Human cytomegalovirus
ttttgcgaacttttaggaaccagcaagtcaacaaaagactaacaaagaaa

SEQ ID NO: 7457 - DNA, 50 bp, Homo sapiens; identical to SEQ ID NO: 4181

SEQ ID NO: 7458 - DNA, 50 bp, Homo sapiens; identical to SEQ ID NO: 4174

SEQ ID NO: 7459 - DNA, 50 bp, Human cytomegalovirus; identical to SEQ ID NO: 4177

SEQ ID NO: 7460 - DNA, 50 bp, Human cytomegalovirus; identical to SEQ ID NO: 4182

SEQ ID NO: 7461 - DNA, 50 bp, Human cytomegalovirus; identical to SEQ ID NO: 4179

SEQ ID NO: 7462 - DNA, 50 bp, Human cytomegalovirus; identical to SEQ ID NO: 4183

SEQ ID NO: 7463 - DNA, 50 bp, Human cytomegalovirus; identical to SEQ ID NO: 4175

SEQ ID NO: 7464 - DNA, 50 bp, Human cytomegalovirus; identical to SEQ ID NO: 4184

SEQ ID NO: 7465 - DNA, 50 bp, Human cytomegalovirus
ctgcatcgtcgtcgtcctcctcctctcggagatcgcgacggagaaacaac

SEQ ID NO: 7466 - DNA, 50 bp, Human cytomegalovirus
ctgagcctggccatcgaggcagccatccaggacctgaggaacaagtctca

SEQ ID NO: 7467 - DNA, 50 bp, Human cytomegalovirus; identical to SEQ ID NO: 4178

SEQ ID NO: 7468 - DNA, 50 bp, Human cytomegalovirus; identical to SEQ ID NO: 4180

SEQ ID NO: 7469 - DNA, 50 bp, Human adenovirus type 2
ctgtggaatgtatcgaggacttgcttaacgagtctgggcaacctttggac

SEQ ID NO: 7470 - DNA, 50 bp, Human adenovirus type 2
gctggcctgcacccgcgctgagtttggctctagcgatgaagatacagatt

SEQ ID NO: 7471 - DNA, 50 bp, Human adenovirus type 2
ggggcggttaggctgtcctccttctcgactgactccatgatctttttctg

SEQ ID NO: 7472 - DNA, 50 bp, Human adenovirus type 2
tgtttgccttattattatgtggcttatttgttgcctaaagcgcagacgcg

SEQ ID NO: 7473 - DNA, 50 bp, Homo sapiens
acggtgatcaatataagctatgtggtggtggggctatactactgaatgaa

SEQ ID NO: 7474 - DNA, 50 bp, Human adenovirus type 2
tttctgccctgaaggcttcctcccctcccaatgcggtttaaaacataaat

SEQ ID NO: 7475 - DNA, 50 bp, Human adenovirus type 2
ggcttatgcccatgtatctgaacatccagagtcacctttaccacgtcctg

SEQ ID NO: 7476 - DNA, 50 bp, Human adenovirus type 2
ctactgccgtacagcgaaagccgccccaacccgcgaaacgaggagatatg

SEQ ID NO: 7477 - DNA, 50 bp, Homo sapiens; identical to SEQ ID NO: 7104

SEQ ID NO: 7478 - DNA, 50 bp, Homo sapiens; identical to SEQ ID NO: 7105

SEQ ID NO: 7479 - DNA, 50 bp, Homo sapiens; identical to SEQ ID NO: 7106

SEQ ID NO: 7480 - DNA, 50 bp, Homo sapiens; identical to SEQ ID NO: 7107

SEQ ID NO: 7481 - DNA, 50 bp, Homo sapiens; identical to SEQ ID NO: 7108

SEQ ID NO: 7482 - DNA, 50 bp, Homo sapiens; identical to SEQ ID NO: 7109

SEQ ID NO: 7483 - DNA, 50 bp, Homo sapiens; identical to SEQ ID NO: 7110

SEQ ID NO: 7484 - DNA, 50 bp, Homo sapiens; identical to SEQ ID NO: 7111

SEQ ID NO: 7485 - DNA, 50 bp, Homo sapiens; identical to SEQ ID NO: 7112

SEQ ID NO: 7486 - DNA, 50 bp, Homo sapiens; identical to SEQ ID NO: 7113

SEQ ID NO: 7487 - DNA, 50 bp, Homo sapiens; identical to SEQ ID NO: 7114

SEQ ID NO: 7488 - DNA, 50 bp, Homo sapiens; identical to SEQ ID NO: 7115

SEQ ID NO: 7489 - DNA, 50 bp, Homo sapiens; identical to SEQ ID NO: 7116

SEQ ID NO: 7490 - DNA, 50 bp, Homo sapiens; identical to SEQ ID NO: 7117

SEQ ID NO: 7491 - DNA, 50 bp, Homo sapiens; identical to SEQ ID NO: 7118

SEQ ID NO: 7492 - DNA, 50 bp, Homo sapiens; identical to SEQ ID NO: 7119

SEQ ID NO: 7493 - DNA, 50 bp, Homo sapiens; identical to SEQ ID NO: 7120

SEQ ID NO: 7494 - DNA, 50 bp, Homo sapiens; identical to SEQ ID NO: 7121

SEQ ID NO: 7495 - DNA, 50 bp, Homo sapiens; identical to SEQ ID NO: 7122

SEQ ID NO: 7496 - DNA, 50 bp, Homo sapiens; identical to SEQ ID NO: 7123

SEQ ID NO: 7497 - DNA, 50 bp, Homo sapiens; identical to SEQ ID NO: 7124

SEQ ID NO: 7498 - DNA, 50 bp, Homo sapiens; identical to SEQ ID NO: 7125

SEQ ID NO: 7499 - DNA, 50 bp, Homo sapiens; identical to SEQ ID NO: 7126

SEQ ID NO: 7500 - DNA, 50 bp, Homo sapiens; identical to SEQ ID NO: 7127

SEQ ID NO: 7501 - DNA, 50 bp, Homo sapiens; identical to SEQ ID NO: 7128

SEQ ID NO: 7502 - DNA, 50 bp, Homo sapiens; identical to SEQ ID NO: 7129

SEQ ID NO: 7503 - DNA, 50 bp, Homo sapiens; identical to SEQ ID NO: 7130

SEQ ID NO: 7504 - DNA, 50 bp, Homo sapiens; identical to SEQ ID NO: 7131

SEQ ID NO: 7505 - DNA, 50 bp, Homo sapiens; identical to SEQ ID NO: 7132

SEQ ID NO: 7506 - DNA, 50 bp, Homo sapiens; identical to SEQ ID NO: 7133

SEQ ID NO: 7507 - DNA, 50 bp, Homo sapiens; identical to SEQ ID NO: 7134

SEQ ID NO: 7508 - DNA, 50 bp, Homo sapiens; identical to SEQ ID NO: 7135

SEQ ID NO: 7509 - DNA, 50 bp, Homo sapiens; identical to SEQ ID NO: 7136

SEQ ID NO: 7510 - DNA, 50 bp, Homo sapiens; identical to SEQ ID NO: 6930

SEQ ID NO: 7511 - DNA, 50 bp, Homo sapiens; identical to SEQ ID NO: 7138

SEQ ID NO: 7512 - DNA, 50 bp, Homo sapiens; identical to SEQ ID NO: 7139

SEQ ID NO: 7513 - DNA, 50 bp, Homo sapiens; identical to SEQ ID NO: 7140

SEQ ID NO: 7514 - DNA, 50 bp, Homo sapiens; identical to SEQ ID NO: 7141

SEQ ID NO: 7515 - DNA, 56 bp, Homo sapiens
tctagggcaggaacatggctgcagcatataaaaagaattgaattccatacttttgt

SEQ ID NO: 7516 - DNA, 50 bp, Homo sapiens; identical to SEQ ID NO: 7143

SEQ ID NO: 7517 - DNA, 50 bp, Homo sapiens; identical to SEQ ID NO: 7144

SEQ ID NO: 7518 - DNA, 50 bp, Homo sapiens; identical to SEQ ID NO: 7145

SEQ ID NO: 7519 - DNA, 50 bp, Homo sapiens; identical to SEQ ID NO: 7146

SEQ ID NO: 7520 - DNA, 50 bp, Homo sapiens; identical to SEQ ID NO: 7147

SEQ ID NO: 7521 - DNA, 50 bp, Homo sapiens; identical to SEQ ID NO: 7148

SEQ ID NO: 7522 - DNA, 50 bp, Homo sapiens; identical to SEQ ID NO: 7149

SEQ ID NO: 7523 - DNA, 50 bp, Homo sapiens; identical to SEQ ID NO: 7150

SEQ ID NO: 7524 - DNA, 50 bp, Homo sapiens; identical to SEQ ID NO: 7151

SEQ ID NO: 7525 - DNA, 50 bp, Homo sapiens; identical to SEQ ID NO: 7152

SEQ ID NO: 7526 - DNA, 50 bp, Homo sapiens; identical to SEQ ID NO: 7153

SEQ ID NO: 7527 - DNA, 50 bp, Homo sapiens; identical to SEQ ID NO: 7154

SEQ ID NO: 7528 - DNA, 50 bp, Homo sapiens; identical to SEQ ID NO: 7155

SEQ ID NO: 7529 - DNA, 50 bp, Homo sapiens; identical to SEQ ID NO: 7156

SEQ ID NO: 7530 - DNA, 50 bp, Homo sapiens; identical to SEQ ID NO: 7157

SEQ ID NO: 7531 - DNA, 50 bp, Homo sapiens; identical to SEQ ID NO: 7158

SEQ ID NO: 7532 - DNA, 50 bp, Homo sapiens; identical to SEQ ID NO: 7159

SEQ ID NO: 7533 - DNA, 50 bp, Homo sapiens; identical to SEQ ID NO: 7160

SEQ ID NO: 7534 - DNA, 50 bp, Homo sapiens
tactggcgtcgagcccactgcctcagaagacttcctttcatctgttccta

SEQ ID NO: 7535 - DNA, 50 bp, Homo sapiens
gtttcaagggacatcttcagagccaacatctaccctcggggctttgtgaa

SEQ ID NO: 7536 - DNA, 50 bp, Homo sapiens
ctacagttctaccataaacactcagtccccgtgtacttccctgcacagga

SEQ ID NO: 7537 - DNA, 50 bp, Homo sapiens
tagttgcatgtgacaacagagatcaacgacgagaccctccacagtatccg

SEQ ID NO: 7538 - DNA, 50 bp, Homo sapiens
ttgaccatagaatcaagcctgaggctgtgaagatggtgcaagtgtggaga

SEQ ID NO: 7539 - DNA, 50 bp, Homo sapiens
ctgctgtcttcacccgaatctcccattaccggccctggatcaaccagatc

SEQ ID NO: 7540 - DNA, 50 bp, Homo sapiens
gtcactggaggaccaacccctgctgtccaaaacaccactgcttcctaccc

SEQ ID NO: 7541 - DNA, 50 bp, Human herpesvirus type 4
catgccatgcatatttcaactgggctgtctatttttgacaccagcttatt

SEQ ID NO: 7542 - DNA, 50 bp, Human herpesvirus type 4
gagaagcacctcaacctggagacaattctactgttcaaacagcagcagca

SEQ ID NO: 7543 - DNA, 50 bp, Human herpesvirus type 4
acttgtcagggccattctctctccgggcactgggtcactaggactgtttt

SEQ ID NO: 7544 - DNA, 50 bp, Human herpesvirus type 4
gacagcgtcctagaaaccctggcgaccattgcctccagcgggatagagtg

SEQ ID NO: 7545 - DNA, 50 bp, Human herpesvirus type 4
catcctctggagcctgacctgtgatcgtcgcatcatagaccgccagtaga

SEQ ID NO: 7546 - DNA, 50 bp, Human herpesvirus type 4
gcctccacacgacatcacaccatataccgcaaggaatatcagggatgctg

SEQ ID NO: 7547 - DNA, 50 bp, Homo sapiens
acagccatcctccccttgagagtcatcagaaaaatacattaggaaaatgt

SEQ ID NO: 7548 - DNA, 50 bp, Human herpesvirus type 4
accttcgtcttctgagtctcatgcctcaaaacctagtttgatagacagga

SEQ ID NO: 7549 - DNA, 50 bp, Human herpesvirus type 4
agatggctacccttctgattatgatcctttcgtagaaaatgctcaaatct

SEQ ID NO: 7550 - DNA, 50 bp, Human herpesvirus type 4
atgcatcgccgacaagtcttgaattaggattgtcgaaattagacaaagaa

SEQ ID NO: 7551 - DNA, 50 bp, Human herpesvirus type 4
cgggtgtgttcaatcatcgacggtgacaatcctatctccatctataatcc

SEQ ID NO: 7552 - DNA, 50 bp, Human herpesvirus type 4
gaagagcgaaatgcaatcttctgcttcttcagtagagactttacagtctt

SEQ ID NO: 7553 - DNA, 50 bp, Human herpesvirus type 4
gcacatccatcgcccaaagtgaagtctgcaaggatgccatttattggttg

SEQ ID NO: 7554 - DNA, 50 bp, Human herpesvirus type 4
tctcggtttacctttttgctgttgtggttctttgttcttgctggtttgct

SEQ ID NO: 7555 - DNA, 50 bp, Human herpesvirus 4
tctgaatactctacaaaacgctccttgtctgctcttaaaaccatctgtgt

SEQ ID NO: 7556 - DNA, 50 bp, Human herpesvirus 6
tgaagctgacacctgtgaaactaacttaaacgcatgttcttctgactcag

SEQ ID NO: 7557 - DNA, 50 bp, Human herpesvirus 6
ttctgttttgggccaggaaccgttctataaattgttttattgactacacg

SEQ ID NO: 7558 - DNA, 50 bp, Human herpesvirus 6
taacaccgtccaagaaattttgccgttgtgtccccatacttctctagggc

SEQ ID NO: 7559 - DNA, 50 bp, Human herpesvirus 6
agaagaaggatcagatggagagttgaaaactttagctggtaagtacatga

SEQ ID NO: 7560 - DNA, 50 bp, Human herpesvirus 6
ccgataccggcaagatctgtcgtctggcaaactcgttttccaccttatgg

SEQ ID NO: 7561 - DNA, 50 bp, Human herpesvirus 6
ctgtgggtccctccccctcatctgttattcccttcccctctgccaccgat

SEQ ID NO: 7562 - DNA, 55 bp, Homo sapiens
actacattttaattaaagattaatgggcatattagaagtttctcaaagttaggct

SEQ ID NO: 7563 - DNA, 50 bp, Homo sapiens
aaaaggagtgagctatcatcagtgctgtgaaataaaagtctggtgtgcca

SEQ ID NO: 7564 - DNA, 50 bp, Homo sapiens
aaagccaccactgttcccagtcagcatatacaagctcttaatattctgtt

SEQ ID NO: 7565 - DNA, 50 bp, Homo sapiens
aaatgtgggataacgcgatgactgtgaccctggttggaaattaaacttgt

SEQ ID NO: 7566 - DNA, 50 bp, Homo sapiens
aacacagaaacatttgagcattgtatttctcgcatcccttctcgtgagcg

SEQ ID NO: 7567 - DNA, 50 bp, Homo sapiens
aacctatcaaagcctagcctaagggctgccatctctgtctaaattctagt

SEQ ID NO: 7568 - DNA, 50 bp, Homo sapiens
aactgcatggtatgaattcagagtgtgacttaagggtcaattcaaagcag

SEQ ID NO: 7569 - DNA, 50 bp, Homo sapiens
acagactttgttaatgtaggaaatctctccaagtggaaacgtgctaactt

SEQ ID NO: 7570 - DNA, 50 bp, Homo sapiens
acaggcaattcagtggactataataatagtggagggttgagatgtagagt

SEQ ID NO: 7571 - DNA, 50 bp, Homo sapiens
acaggtcacagtggatttcttttcaaactgacaatgtttaggttttaagc

SEQ ID NO: 7572 - DNA, 50 bp, Homo sapiens
acctcaagcagatgagattcaggtaattgaagaggcagatgaagaggaat

SEQ ID NO: 7573 - DNA, 50 bp, Homo sapiens
accttctacaccactggaaaataacatggaggtttagagccgtgcaaaat

SEQ ID NO: 7574 - DNA, 50 bp, Homo sapiens
actaaactctgaggcctgaagttctgtgatagaccttaaataagtgtcct

SEQ ID NO: 7575 - DNA, 50 bp, Homo sapiens
actggggtggtgatgttttcgttctgttttatttttctaactctgctgac

SEQ ID NO: 7576 - DNA, 50 bp, Homo sapiens
acttcatcataatttggagggaagctcttggagctgtgagttctccctgt

SEQ ID NO: 7577 - DNA, 50 bp, Homo sapiens
agaacgaggaagagaacacaaggaatgattcaagatccaccttgagagga

SEQ ID NO: 7578 - DNA, 50 bp, Homo sapiens
agagaataggctttctaagatgctgcgatcccgttctgctgcccgtaata

SEQ ID NO: 7579 - DNA, 50 bp, Homo sapiens
agcacaagccacgcttcaccaccaagaggcccaacaccttcttctaggtg

SEQ ID NO: 7580 - DNA, 50 bp, Homo sapiens
aggccaatcactgctgactaagaattcattatattggcttagtacacaga

SEQ ID NO: 7581 - DNA, 50 bp, Homo sapiens
agggaagatttctgtatacttgctggagaggaggaatgtgtatagttact

SEQ ID NO: 7582 - DNA, 50 bp, Homo sapiens
agttttaataccttaagctttttcaagacctaactgcagccgctttggga

SEQ ID NO: 7583 - DNA, 50 bp, Homo sapiens
atgtgctgtaaagtttcttctttccagtaaagactagccattgcattggc

SEQ ID NO: 7584 - DNA, 50 bp, Homo sapiens
attgtgggtggctctgtgggcgcatcaataaaagccgtccttgattttat

SEQ ID NO: 7585 - DNA, 50 bp, Homo sapiens
atttgagtgttgttggaccatgtgtgatcagactgctatctgaataaaat

SEQ ID NO: 7586 - DNA, 50 bp, Homo sapiens
caagcccacccagccgcacacaggcctagaggtaaccaataaagtattag

SEQ ID NO: 7587 - DNA, 50 bp, Homo sapiens
caccagagacaagcagagtaacaggatcagtgggtctaagtgtccgagac

SEQ ID NO: 7588 - DNA, 50 bp, Homo sapiens
caggaggtagggatctggctgagagggaataatctgagcaaaggtatgaa

SEQ ID NO: 7589 - DNA, 50 bp, Homo sapiens
cagtccctctcccaggaggaccctagaggcaattaaatgatgtcctgttc

SEQ ID NO: 7590 - DNA, 50 bp, Homo sapiens
catgagaagtatctgcaataaccccaagtcaacatttaggtttgtgtaca

SEQ ID NO: 7591 - DNA, 50 bp, Homo sapiens
catgttgagtaggaataaataaatctgatgctgcctcctgaggctgcggg

SEQ ID NO: 7592 - DNA, 50 bp, Homo sapiens
ccaccacctctgtggcattgaaatgagcacctccattaaagtctgaatca

SEQ ID NO: 7593 - DNA, 50 bp, Homo sapiens
ccatgccgcctcgttggattgtcggaatgtagacagaaatgtactgttct

SEQ ID NO: 7594 - DNA, 50 bp, Homo sapiens
cccaccgctttgtgagccgtgtcgtatgacctagtaaactttgtaccaat

SEQ ID NO: 7595 - DNA, 50 bp, Homo sapiens
cccacgggagactatttcacacaatttaatacaggaagtcgataatgagg

SEQ ID NO: 7596 - DNA, 50 bp, Homo sapiens
ccctccgtgaggaacacaatctcaatcgttgctgaatcctttcatatcct

SEQ ID NO: 7597 - DNA, 50 bp, Homo sapiens
ccgtgtctttccagccctaaaggaagggcagacccgtgtctttccatgcc

SEQ ID NO: 7598 - DNA, 50 bp, Homo sapiens
cctgaagcacttcacctggaattgatgtgtaggcttaaggagtatgtgac

SEQ ID NO: 7599 - DNA, 50 bp, Homo sapiens
cgcaggcaagagcactcatcaagatagatgtgaacaaaacccggaaaatc

SEQ ID NO: 7600 - DNA, 50 bp, Homo sapiens
cgctcaaaggtcactgagacttttgcctcacctaaagagaccaaggctca

SEQ ID NO: 7601 - DNA, 50 bp, Homo sapiens
cggcctcagtccctactctgctttgggatagtgtgagcttcattttgtac

SEQ ID NO: 7602 - DNA, 50 bp, Homo sapiens
ctagtgtgtgcttgccttgtccctcggggtagatgcttagctggcagtat

SEQ ID NO: 7603 - DNA, 50 bp, Homo sapiens
ctttcagattccctctggtctccgtccgaaacgtctacctcttcccaggc

SEQ ID NO: 7604 - DNA, 50 bp, Homo sapiens
gaaattcacaggccagggcacatcttttatttatttcattatgttggcca

SEQ ID NO: 7605 - DNA, 50 bp, Homo sapiens
gactccctcaacaccccaaaactctaaatgccacggtcatctgtttctat

SEQ ID NO: 7606 - DNA, 50 bp, Homo sapiens
gagcagccacaaaactgtaacctcaaggaaaccataaagcttggagtgcc

SEQ ID NO: 7607 - DNA, 50 bp, Homo sapiens
gcagcaaacagagggtcagtcacaggatgttctgacacaccattgtaact

SEQ ID NO: 7608 - DNA, 50 bp, Homo sapiens
gccaacaatgctgaccggtgcttatcctctaagccctgatccacaataaa

SEQ ID NO: 7609 - DNA, 50 bp, Homo sapiens
gccagtgtaatttctgtcaaccacggacgtttgccttcatgtgtagaatt

SEQ ID NO: 7610 - DNA, 50 bp, Homo sapiens
gcccaagcactagtagagatgcgcgatacaggtctagtttcggtaactgt

SEQ ID NO: 7611 - DNA, 50 bp, Homo sapiens
ggccagattttgactcccagattcctttacaaaacgcactcattcattca

SEQ ID NO: 7612 - DNA, 50 bp, Homo sapiens
gggactccccgcgtgataaattattaatgttccgcagtctcactctgaat

SEQ ID NO: 7613 - DNA, 50 bp, Homo sapiens
gggactgcatgggaagcacggaatatagggttagatgtgtgttatctgta

SEQ ID NO: 7614 - DNA, 50 bp, Homo sapiens
ggggttcgtgtctttggcatcaacaaatactgagggatgggttttgggac

SEQ ID NO: 7615 - DNA, 50 bp, Homo sapiens
gggtgacctgttctctagctgtgatcttaccacttcaaatgggtgtaatt

SEQ ID NO: 7616 - DNA, 50 bp, Homo sapiens
ggtgtgaacgggctgacttggtgaattgggcaactccttatagtgttgtg

SEQ ID NO: 7617 - DNA, 50 bp, Homo sapiens
gtaccacttgaatgatttcagtcaattttgaacccctttggaaagaggtg

SEQ ID NO: 7618 - DNA, 50 bp, Homo sapiens
gtgaaaccccgtctctgctaaaaatacaaaaattagctgggcgtggtggc

SEQ ID NO: 7619 - DNA, 50 bp, Homo sapiens
gttctctgggttgtgctttactccacgcatcaataaataattttgaaggc

SEQ ID NO: 7620 - DNA, 50 bp, Homo sapiens
tactgccaactgaccttataaccctctgcaccttcaaaaagattcatggt

SEQ ID NO: 7621 - DNA, 50 bp, Homo sapiens
tcaaacagtgacatctcttgggaaaatggacttaataggaatatgggact

SEQ ID NO: 7622 - DNA, 50 bp, Homo sapiens
tcacttcctctgaactgttactgcctgaatggagtcctggacgacattgg

SEQ ID NO: 7623 - DNA, 50 bp, Homo sapiens
tccacttaatagactctatgtgtgctgaatgttcctgtgtacatatgtgt

SEQ ID NO: 7624 - DNA, 50 bp, Homo sapiens
tcccgcagagtgcagagacaggaagctggagatgtctttataaagtcaca

SEQ ID NO: 7625 - DNA, 50 bp, Homo sapiens
tctaggaccctaggaagcttaactctgtcatcatctcaagtatctgcaca

SEQ ID NO: 7626 - DNA, 50 bp, Homo sapiens
tcttccgccatctcctctgataaacacgaggtgtctgccagcacccagag

SEQ ID NO: 7627 - DNA, 50 bp, Homo sapiens
tgatatgttgatcagccttatgtggaagaactgtgataaaaagaggagct

SEQ ID NO: 7628 - DNA, 50 bp, Homo sapiens
tgcagtatttttcaaacttctggtcgcaaacccattagtagtttgtgaaa

SEQ ID NO: 7629 - DNA, 50 bp, Homo sapiens
tgctgctcttgatcccacctttgctcctgacaaccctcattcaataaaga

SEQ ID NO: 7630 - DNA, 50 bp, Homo sapiens
tggtttgttcatggatgtattctaagagctgagaacagggcctggacaca

SEQ ID NO: 7631 - DNA, 50 bp, Homo sapiens
tgttctgaatgttggtagacccttcatagctttgttacaatgaaaccttg

SEQ ID NO: 7632 - DNA, 50 bp, Homo sapiens
tgttgatggatgaattttggcatgatgactgtactctcaataaaggctga

SEQ ID NO: 7633 - DNA, 50 bp, Homo sapiens
ttcatcctgtgagtgctggggaggaggagtagatacagactgagtgagag

SEQ ID NO: 7634 - DNA, 50 bp, Homo sapiens
ttcattttcctgggaagtcaaggttacatcttgcagaggttgttttgaga

SEQ ID NO: 7635 - DNA, 50 bp, Homo sapiens
ttctaagccgaaccaaatcctttgccttgaaagaacagccctaaagtggt

SEQ ID NO: 7636 - DNA, 50 bp, Homo sapiens
tttgtttgtttgtttcagatagggtctccctctgtcacccaggctgcagt

SEQ ID NO: 7637 - DNA, 50 bp, Homo sapiens
ttttgtaaatcacggacacctcaattagcaagaactgaggggagggcttt

SEQ ID NO: 7638 - DNA, 50 bp, Homo sapiens
cggtgtggaaaatgttgtcctttgagtggcaagaattagaaaaatcttca

SEQ ID NO: 7639 - DNA, 50 bp, Homo sapiens
ctgaaagctgaggatcggagcaagtttctggacgcacttatttccctcct

SEQ ID NO: 7640 - DNA, 50 bp, Homo sapiens
gttggcctcagccctgtgggtctgtctcatgctctccctgttcctctccc

SEQ ID NO: 7641 - DNA, 50 bp, Homo sapiens
tagccatacttagcctcagcaggagcctggcctgtaacttataaagtgca

SEQ ID NO: 7642 - DNA, 50 bp, Homo sapiens
tgagggctgtgctgacctttgagaggatttgaaattgcttcatattgtga

SEQ ID NO: 7643 - DNA, 50 bp, Homo sapiens
tgtgtaagaaaaggcccattacttttaaggtatgtgctgtcctattgagc

SEQ ID NO: 7644 - DNA, 50 bp, Homo sapiens
ttgttggtaggcacatcgtgtcaagtgaagtagttttataggtatgggtt

SEQ ID NO: 7645 - DNA, 50 bp, Homo sapiens
tttctagcttttccgtgtatctaaacacaatttgctacacaagtcactgt

SEQ ID NO: 7646 - DNA, 50 bp, Homo sapiens
actgtggcacatgttttgatcagaaaggtagttctctttgctctggtagt

SEQ ID NO: 7647 - DNA, 50 bp, Homo sapiens
catcttctgccctggtcccctttctcttgatgtggaaagtctgaatgcag

SEQ ID NO: 7648 - DNA, 50 bp, Homo sapiens
cgctctaatactgcattctgtttctccttttgtgccctgattgtaatcca

SEQ ID NO: 7649 - DNA, 50 bp, Homo sapiens
ctggagactggagaagtaattccaccaatgaaagaatttcctgatcaaca

SEQ ID NO: 7650 - DNA, 50 bp, Homo sapiens
tcagtgtttcgttattccatatcagtggcttttactgtcaaagattgtgt

SEQ ID NO: 7651 - DNA, 50 bp, Homo sapiens
tgcatgagagccctaggatttaaaatatgaaatggtggtctgctgtgtga

SEQ ID NO: 7652 - DNA, 50 bp, Homo sapiens
tgtgctaagcctgatgaaatgtgctccttcaatctccatgaaaccatcgt

SEQ ID NO: 7653 - DNA, 50 bp, Homo sapiens
aaatgatctccctttattaccctcccaaaggttaccagcgtttgaattta

SEQ ID NO: 7654 - DNA, 50 bp, Homo sapiens
acacactaatgtaaccattttatgaaggttgaagtggatttatgcaggca

SEQ ID NO: 7655 - DNA, 50 bp, Homo sapiens
atcaggagaatgtcaaagaagtcctttatgtggattgcccgagcttctct

SEQ ID NO: 7656 - DNA, 50 bp, Homo sapiens
attgtgccactgttttccagcctgggcaatacagtgagaccctgtctcaa

SEQ ID NO: 7657 - DNA, 50 bp, Homo sapiens
cgtcaaagtcaatcccaaaacagataagccctatgaggatgtcagcatca

SEQ ID NO: 7658 - DNA, 50 bp, Homo sapiens
acgacttgctcaagagtaaagattatactgctctgtacaggaagcttgca

SEQ ID NO: 7659 - DNA, 50 bp, Homo sapiens
tgttgaggaaaggaaaagggcatttgtctaaacatggattctgagttgta

SEQ ID NO: 7660 - DNA, 50 bp, Homo sapiens
gtggatgagtagggagtgggcgagacagggacgagatgagcagggtcaag

SEQ ID NO: 7661 - DNA, 50 bp, Homo sapiens
ggtgttcgtgttagtgccaagattgcttcgttgtagagagagttcgttcc

SEQ ID NO: 7662 - DNA, 50 bp, Homo sapiens
actagagtccaggtaatagtagtggagatatgtggagagacatgataggt

SEQ ID NO: 7663 - DNA, 50 bp, Homo sapiens
ttcctgtgtgagatttctcgccattcctcaattcaacaaatatgcctttt

SEQ ID NO: 7664 - DNA, 50 bp, Homo sapiens
tatactttgatccctcagcaagttgtcctcactgttgtgtgaacctgttt

SEQ ID NO: 7665 - DNA, 50 bp, Homo sapiens
tttcctgaatactttatgacaactgagtttgccgggtagagtggccgttt

SEQ ID NO: 7666 - DNA, 50 bp, Homo sapiens
aaactagaattccggtttcccaaggtggcttatgacaaccagaatccttt

SEQ ID NO: 7667 - DNA, 50 bp, Homo sapiens
ggcttcccgcctgtgcagtcatttgtatgtgttttatatattggagtgtt

SEQ ID NO: 7668 - DNA, 50 bp, Homo sapiens
acaaaatataaggtgtgactttggatcctgactcaaaccaaccagctgtt

SEQ ID NO: 7669 - DNA, 50 bp, Homo sapiens
tcaaaatccgttactctttccacaacaattgagggtaatggtgttcagtt

SEQ ID NO: 7670 - DNA, 50 bp, Homo sapiens
gccattccggcttctctatttgaaaacagttaccatattccccctcagtt

SEQ ID NO: 7671 - DNA, 50 bp, Homo sapiens
atttggtagagacggggtttcaccttattgcccaggccatcatgtatctt

SEQ ID NO: 7672 - DNA, 50 bp, Homo sapiens
tgtcatttgccctttcccccatatatgtagaattgggtctttttcaactt

SEQ ID NO: 7673 - DNA, 50 bp, Homo sapiens
acagggagagactacacacaagccaacctcaatctcatctttatgccatt

SEQ ID NO: 7674 - DNA, 50 bp, Homo sapiens
tcttctttttgatgtgaattactcttgaaatgccggagaagggacaaatt

SEQ ID NO: 7675 - DNA, 50 bp, Homo sapiens
agatagagtcatattctatttagcttgggacatggcaggtactcagttgt

SEQ ID NO: 7676 - DNA, 50 bp, Homo sapiens
agcctttttgggagtgagggtttatatgatgtctgattctgtaatactgt

SEQ ID NO: 7677 - DNA, 50 bp, Homo sapiens
gcagccctgagcctggaatagatactttttggtcttttggttgtagatgt

SEQ ID NO: 7678 - DNA, 50 bp, Homo sapiens
ccctccctatctttttatgggtaatttgattatacacggtgcttgaatgt

SEQ ID NO: 7679 - DNA, 50 bp, Homo sapiens
tatgtcttcttaccccagcacccctaatttaaaatacagatccctgaggt

SEQ ID NO: 7680 - DNA, 50 bp, Homo sapiens
aaaaccttgacagttcatttcaccaagcacctatcaggtatttggcaggt

SEQ ID NO: 7681 - DNA, 50 bp, Homo sapiens
agtgcccatgctgtttcagatgctcttctagctcctggagatacatcagt

SEQ ID NO: 7682 - DNA, 50 bp, Homo sapiens
tgagcttctgctagtaattccttcaggggatttcctccatggccgtaagt

SEQ ID NO: 7683 - DNA, 50 bp, Homo sapiens
gagggtgtctgctaatgatttccgaaaagttcttcaaaacactccgaagt

SEQ ID NO: 7684 - DNA, 50 bp, Homo sapiens
accagtgtgatgagttttgacaagagacaaaaggaaagggtgggagaagt

SEQ ID NO: 7685 - DNA, 50 bp, Homo sapiens
gctggttgttgcctttcaagacagccaactaccatttattcaacagaagt

SEQ ID NO: 7686 - DNA, 50 bp, Homo sapiens
agtctgtctattctcttctctttagctctgtctgttgctcaaattcaagt

SEQ ID NO: 7687 - DNA, 50 bp, Homo sapiens
gccaaggtgagtcaaaacactgctcttcagaaagcaattatttgaaaagt

SEQ ID NO: 7688 - DNA, 50 bp, Homo sapiens
cattgtccctcccgctgtgctctcaggcaataaatgatttgattatttct

SEQ ID NO: 7689 - DNA, 50 bp, Homo sapiens
ggtcagaaacaggcccacagagactctggagggttcttcctttgtgttct

SEQ ID NO: 7690 - DNA, 50 bp, Homo sapiens
ttcaactgctttggcactgccatgggtacctgaggataagagagatgtct

SEQ ID NO: 7691 - DNA, 50 bp, Homo sapiens
gggttgactaaatgcacatgggcttatctttacctcttccagaaatgtct

SEQ ID NO: 7692 - DNA, 50 bp, Homo sapiens
tgcatgaccagaaacactgcctgatacagtaagcagaggtagctgtctct

SEQ ID NO: 7693 - DNA, 50 bp, Homo sapiens
acctgccagccagcccacaactataaactgtgtgacacccaaatttatct

SEQ ID NO: 7694 - DNA, 50 bp, Homo sapiens
ggtttctgaggtgattctaatatgcagtcatggttaagaacctgtgatct

SEQ ID NO: 7695 - DNA, 50 bp, Homo sapiens
aagccttggaccagcttcccgtttctctcttgtctcctgccaaaagatct

SEQ ID NO: 7696 - DNA, 50 bp, Homo sapiens
acccaaaggatggtgtctcctgtcccagttgaaaaggtttctacctagct

SEQ ID NO: 7697 - DNA, 50 bp, Homo sapiens
tggttgaatacgcaggaacacccacagtacccagggactaataaatagct

SEQ ID NO: 7698 - DNA, 50 bp, Homo sapiens
ttagggcagtggagaatcagggtgtatctaataaattccttcatggagct

SEQ ID NO: 7699 - DNA, 50 bp, Homo sapiens
gcagatgtctgcgtcatggtttattactcctgtgttcgtttcaaggagct

SEQ ID NO: 7700 - DNA, 50 bp, Homo sapiens
tgtctgtatttggagtccagtagtacactgaaaataatcccgtaaaagct

SEQ ID NO: 7701 - DNA, 50 bp, Homo sapiens
ctcccttcccaccatacacacactcccagctcattttgattccttttcct

SEQ ID NO: 7702 - DNA, 50 bp, Homo sapiens
ggtgaaattgactgggttcctctcccacctctctttccgtagcaattcct

SEQ ID NO: 7703 - DNA, 50 bp, Homo sapiens
actaattcccgtgtctggccctgaacatgaagatataatggacgatccct

SEQ ID NO: 7704 - DNA, 50 bp, Homo sapiens
ttaaaggctcaaacctacctcagacactgctctacccatccccatcccct

SEQ ID NO: 7705 - DNA, 50 bp, Homo sapiens
ccctttgtgagaagaagcaggtttcctttcctatggattgatgtgaccct

SEQ ID NO: 7706 - DNA, 50 bp, Homo sapiens
ttctacccatcacacagattcttccacttaataaaatccatcacctacct

SEQ ID NO: 7707 - DNA, 50 bp, Homo sapiens
tcattactgttgtgaaggctcttcaagagagaaagatgaagctgaaacct

SEQ ID NO: 7708 - DNA, 50 bp, Homo sapiens
gctgtccgtgaaagcactctcaagtcaggaactgaactaagaactttact

SEQ ID NO: 7709 - DNA, 50 bp, Homo sapiens
ctcctgtaatcccagcactggagcttgcagtgagccaagatcatgccact

SEQ ID NO: 7710 - DNA, 50 bp, Homo sapiens
ttggtcaccacacctgggtgtctgaatgtcttgtccttctaaaggtaact

SEQ ID NO: 7711 - DNA, 50 bp, Homo sapiens
gcaacaattctttggaaagtgactctctagggtgcggagaatggtgtgat

SEQ ID NO: 7712 - DNA, 50 bp, Homo sapiens
tcatctctgtaggtcttcctaatcctatgcggagccaaatatagacggat

SEQ ID NO: 7713 - DNA, 50 bp, Homo sapiens
ctttgtatttcaaagaaagtagccccttggctctgatattagttgcagat

SEQ ID NO: 7714 - DNA, 50 bp, Homo sapiens; identical to SEQ ID NO: 5265

SEQ ID NO: 7715 - DNA, 50 bp, Homo sapiens
actgggatgagatgagattcaaggcacttttggagggtgtagctagccat

SEQ ID NO: 7716 - DNA, 50 bp, Homo sapiens
aggctgttgctgcacgggcttttcaaaagcgactcattatgaagaagaat

SEQ ID NO: 7717 - DNA, 50 bp, Homo sapiens
gcactccagcctgggcaacaagagcgaaactctgcctccaataaataaat

SEQ ID NO: 7718 - DNA, 50 bp, Homo sapiens
cgggcggtggcggctgcctgggagaagatgaatctttcatgagtgatttg

SEQ ID NO: 7719 - DNA, 50 bp, Homo sapiens
gatggaactcaaggtgctttacgctttcctcagtcttaccaggaggcttg

SEQ ID NO: 7720 - DNA, 50 bp, Homo sapiens
accaaccctatggacaacttgatcttgaacttctagctttcagacctgtg

SEQ ID NO: 7721 - DNA, 50 bp, Homo sapiens
aatgtagctgacattggagccaccgcccatagaagaaggctaaaactgtg

SEQ ID NO: 7722 - DNA, 50 bp, Homo sapiens
cttcactgacgatctgagacactaggcaggttggaaagggtggagtggtg

SEQ ID NO: 7723 - DNA, 50 bp, Homo sapiens
gcccctggtggttggaaaagtgttctgaatccaataaaaggaaagcggtg

SEQ ID NO: 7724 - DNA, 50 bp, Homo sapiens
caacagtggcaagagtagccagcccataggacggaatgaaaatcaaggtg

SEQ ID NO: 7725 - DNA, 50 bp, Homo sapiens
catccttagatgccagtcttcactttgggtattttcctgcctcctcagtg

SEQ ID NO: 7726 - DNA, 50 bp, Homo sapiens
accaacagtaccgttattgccaccacaagtaaaccagtccctcacttctg

SEQ ID NO: 7727 - DNA, 50 bp, Homo sapiens
aggctaaatcagagctttcctccccagataaaggaaattttccctccctg

SEQ ID NO: 7728 - DNA, 50 bp, Homo sapiens
aacttccagaggcaggagattagacagggatgacagttaaggggttactg

SEQ ID NO: 7729 - DNA, 50 bp, Homo sapiens
acctcttcgttgtattttacctttcacttacaaacaagctcatgccactg

SEQ ID NO: 7730 - DNA, 50 bp, Homo sapiens
gatcaaaacaaggtccttgactttttgcaggggcagcctggcaatcaatg

SEQ ID NO: 7731 - DNA, 50 bp, Homo sapiens
cctaaatgttgtccctcagagatgcacagatgtatatgggtaaggaaatg

SEQ ID NO: 7732 - DNA, 50 bp, Homo sapiens
ccaaccatagtcatgaagctgcttctgttcccaatgcaatcccattgtgg

SEQ ID NO: 7733 - DNA, 50 bp, Homo sapiens
gcttttcaatgcttccgaaactgagtgctaacaggggcaattagtgctgg

SEQ ID NO: 7734 - DNA, 50 bp, Homo sapiens
agttcttgtaacagttaaaactttcttgccagctctcaggttatcactgg

SEQ ID NO: 7735 - DNA, 50 bp, Homo sapiens
gtgtgtaaatgagtgtcagatcttttcttgaaaacaggtttggattgggg

SEQ ID NO: 7736 - DNA, 50 bp, Homo sapiens
agggtccacaaggagaatattttcttaaagtaactccctgatttgcgggg

SEQ ID NO: 7737 - DNA, 50 bp, Homo sapiens
gctcccctatgcctgtgtagcagaatctaaaagataatcatgtgaacggg

SEQ ID NO: 7738 - DNA, 50 bp, Homo sapiens
ttgtcttgtttcttttatctcccctatgtttcatcttagtgcaggcaggg

SEQ ID NO: 7739 - DNA, 50 bp, Homo sapiens
acagttgcctttgagattcctgtatttctgcatgaataaatccataaggg

SEQ ID NO: 7740 - DNA, 50 bp, Homo sapiens
gtccttggaaggtaacacttgtgattggaaccactcttcaagctgaacgg

SEQ ID NO: 7741 - DNA, 50 bp, Homo sapiens
attcattcattcattcaacaagcacttaaaaacaatgcctgtgtgccagg

SEQ ID NO: 7742 - DNA, 50 bp, Homo sapiens
cacacccagccccattcacaaaggactataaaatctacaccccagtcacg

SEQ ID NO: 7743 - DNA, 50 bp, Homo sapiens
ggcatagtagtgctaaacagaggtggaagtagtgaagggagttttgaacg

SEQ ID NO: 7744 - DNA, 50 bp, Homo sapiens
ctagtcctgcccccacctccccaagtattacccctcctaagtcctgctag

SEQ ID NO: 7745 - DNA, 50 bp, Homo sapiens
agataagcaggataaacaagacaggttggattgtgatcagctctatggag

SEQ ID NO: 7746 - DNA, 50 bp, Homo sapiens
gatggctaggacaagatgatttacaagagcgtggcgggagggacggcgag

SEQ ID NO: 7747 - DNA, 50 bp, Homo sapiens
ccgtgtctggattgtgtgtcttacttctaaaggtgcacatacttcataag

SEQ ID NO: 7748 - DNA, 50 bp, Homo sapiens
gtatctctgcacctcactactacccttcactccttggagacctgggcaag

SEQ ID NO: 7749 - DNA, 50 bp, Homo sapiens
aacacaccaccaaacattcttcccatccttcttcaccaaccagctacaag

SEQ ID NO: 7750 - DNA, 50 bp, Homo sapiens
acaattggagttggggctgtcaccacctgaagtgtgtcaaccacagaaag

SEQ ID NO: 7751 - DNA, 50 bp, Homo sapiens
ttagggcaaaagtcctagtggcggcagctttcttgtctagaccctggttc

SEQ ID NO: 7752 - DNA, 50 bp, Homo sapiens
agtgatgcttgccttttcgctttcctaaagatgtcatttgaaaacaagtc

SEQ ID NO: 7753 - DNA, 50 bp, Homo sapiens
cccagcttcattaatgtgaatggtggcagacacctctagctatagagctc

SEQ ID NO: 7754 - DNA, 50 bp, Homo sapiens
gagccaagattgggccactgcactccagcctgggtgacagagtgagactc

SEQ ID NO: 7755 - DNA, 50 bp, Homo sapiens
gagccgagattgcatcactgcactccagcctggtcaacagagcgagactc

SEQ ID NO: 7756 - DNA, 50 bp, Homo sapiens
ttcagtcatgcagcaacatccgcttaatgcctcctaagtgcagaacactc

SEQ ID NO: 7757 - DNA, 50 bp, Homo sapiens
ggtcctcttctctctactctccctagtaactaaccaccaaagcctaaatc

SEQ ID NO: 7758 - DNA, 50 bp, Homo sapiens
ttgtttgtttgtttatttatttattttgaggcagcgtcttgctctgttgc

SEQ ID NO: 7759 - DNA, 50 bp, Homo sapiens
tgccatctttacatctaatcaagaggtagagcttcccctggtgttcctgc

SEQ ID NO: 7760 - DNA, 50 bp, Homo sapiens
tgctctgctcttcccaaatcaaggaatgtagatcttgctaacagaactgc

SEQ ID NO: 7761 - DNA, 50 bp, Homo sapiens
tggcaccaacttacacttccagaagagagtggttcaggaaattactatgc

SEQ ID NO: 7762 - DNA, 50 bp, Homo sapiens
aactttgggaagtgagactctgtcttgggtttttgataataaatgtgggc

SEQ ID NO: 7763 - DNA, 50 bp, Homo sapiens
ccgagaaagtacggctggagcggactggggagacggaaatattgagtcgc

SEQ ID NO: 7764 - DNA, 50 bp, Homo sapiens
cgaagaaagaattggatgcagaattgttgcctaacctgggtgacaagagc

SEQ ID NO: 7765 - DNA, 50 bp, Homo sapiens
agtgcctgtgattccacccccttacctcccactcaagtgacaatgtaagc

SEQ ID NO: 7766 - DNA, 50 bp, Homo sapiens
agaaagttaggagtcggcaaccttaaggaggagtttcctatcatctctcc

SEQ ID NO: 7767 - DNA, 50 bp, Homo sapiens
tgtcacaaagatgaagcaaggtggctcagggaacgtgctcagaaacctcc

SEQ ID NO: 7768 - DNA, 50 bp, Homo sapiens
gcaaagtgaaagttttccctttggccctaaaatatgaaagcaaagcatcc

SEQ ID NO: 7769 - DNA, 50 bp, Homo sapiens
ccctgtccatcttttcctgttcctatccagccttccctctcctttttgcc

SEQ ID NO: 7770 - DNA, 50 bp, Homo sapiens
ccacggagggctccccatctaaagggagtttaataaacaaaggaatggcc

SEQ ID NO: 7771 - DNA, 50 bp, Homo sapiens
caattggtacattctcggcaaacccttgcccacaatttcctcaggaagcc

SEQ ID NO: 7772 - DNA, 50 bp, Homo sapiens
agggtgtccctgtgatttttaaattcactatctagctgtccctatccccc

SEQ ID NO: 7773 - DNA, 50 bp, Homo sapiens
cttatattatgttttctctgtgacaagcacctcacctcccaacccacccc

SEQ ID NO: 7774 - DNA, 50 bp, Homo sapiens
gagaattcaaattaaatgcagagtcctaggcccaccctggcataccaccc

SEQ ID NO: 7775 - DNA, 50 bp, Homo sapiens
acaaccaatgcctcacacttaagctcctagaagtcactagggaccagacc

SEQ ID NO: 7776 - DNA, 50 bp, Homo sapiens
gccctcaccagaattcaatcatgctggcaccttatcttggactttcaacc

SEQ ID NO: 7777 - DNA, 50 bp, Homo sapiens
agggtaagagttccagacctgactggacaataaagtgagactgtctctac

SEQ ID NO: 7778 - DNA, 50 bp, Homo sapiens
ctccgtctgccgcctccgtagccacagcgactttggaagtgatatttgac

SEQ ID NO: 7779 - DNA, 50 bp, Homo sapiens
ccctggagaaggagggtgatttattttcaactttctgatttaccaccgac

SEQ ID NO: 7780 - DNA, 50 bp, Homo sapiens
gattgtttgagcctgggagttccacaccagcctgggctacatagggagac

SEQ ID NO: 7781 - DNA, 50 bp, Homo sapiens
ctgctctagactgagcacagccactgacaggtgaccttcagaatcctcac

SEQ ID NO: 7782 - DNA, 50 bp, Homo sapiens
acccctgctttactgtgacagacatatagtttgtcatacataaaacccac

SEQ ID NO: 7783 - DNA, 50 bp, Homo sapiens
acctaacagaaatttggattcgggttgtctaaatacaccctggtgggtta

SEQ ID NO: 7784 - DNA, 50 bp, Homo sapiens
gcctttcccaccaacagtttatgtgattccctgccctacccttaccatta

SEQ ID NO: 7785 - DNA, 50 bp, Homo sapiens
tcccattgcatgtcccgtatattgaaagctgcctctacttctctctggta

SEQ ID NO: 7786 - DNA, 50 bp, Homo sapiens
ggcaggggatgaaccagataatttccagcccttcttggtagctcttcgta

SEQ ID NO: 7787 - DNA, 50 bp, Homo sapiens
gcttaggagtttgggaccagcctgggtaacatagtgaaaccctgtctcta

SEQ ID NO: 7788 - DNA, 50 bp, Homo sapiens
ttgcagctattttcaagttgtaagaaatgaacttgcaacacatagggcta

SEQ ID NO: 7789 - DNA, 50 bp, Homo sapiens
tctcttgccacagggatttcctccaagctggaatcaccatttccttccta

SEQ ID NO: 7790 - DNA, 50 bp, Homo sapiens
cccacccaccagtaggttgtgattcaactgaaccatttcaggagcaccta

SEQ ID NO: 7791 - DNA, 50 bp, Homo sapiens
gaacccagctaagccacacccagattctgacccagggatactctgaaata

SEQ ID NO: 7792 - DNA, 50 bp, Homo sapiens
gtgtgtgctggcgtgccttataggtgtgcgtgtttccctgtcagttttga

SEQ ID NO: 7793 - DNA, 50 bp, Homo sapiens
aggaaaactcagaaataatttctgccccctggattctctaagatttgtga

SEQ ID NO: 7794 - DNA, 50 bp, Homo sapiens
gtggaaagaatcctacaacgaacactattaaagtctgcacctagatctga

SEQ ID NO: 7795 - DNA, 50 bp, Homo sapiens
ggcctaggttccagcattcagtcatcaagtcttgttacagaaataaatga

SEQ ID NO: 7796 - DNA, 50 bp, Homo sapiens
ccccatttggagtctagtcaaaacagcagcttctttgagttaccattgga

SEQ ID NO: 7797 - DNA, 50 bp, Homo sapiens
aaggcttgtaactgtaggcccttgtactacactgtgctatacctggtaga

SEQ ID NO: 7798 - DNA, 50 bp, Homo sapiens
cactttgggaggcagaggtgagcagatcacttgaggccaggagtttgaga

SEQ ID NO: 7799 - DNA, 50 bp, Homo sapiens
ggatcacttgaagccagcagtttgagaccagcctgggcaataaaatgaga

SEQ ID NO: 7800 - DNA, 50 bp, Homo sapiens
tcagttgtgatgggatttcttgatggatgagatgtgtcgtgtgacagaga

SEQ ID NO: 7801 - DNA, 50 bp, Homo sapiens
cctcctagaactggaaccaagactgctccatcagagttaaaggtgtaaga

SEQ ID NO: 7802 - DNA, 50 bp, Homo sapiens
gctcacccttgcacctccttcccaaatctgctgtcacattttctcaaaga

SEQ ID NO: 7803 - DNA, 50 bp, Homo sapiens
ttcctgtctccatgttgtggtcaagattgccatttgcttcctgagtttca

SEQ ID NO: 7804 - DNA, 50 bp, Homo sapiens
ctggttctagtgcagtctcctcactttcctggtgtttggtttatctttca

SEQ ID NO: 7805 - DNA, 50 bp, Homo sapiens
tgacatgattacctgactgatgtttctcctccattagactgaatgcttca

SEQ ID NO: 7806 - DNA, 50 bp, Homo sapiens
tggcaaaaagcctaacactgactcatcccattctatcagcacaaacttca

SEQ ID NO: 7807 - DNA, 50 bp, Homo sapiens
gtttacaagggatactagttcctggagggacgaaggaggctctgtttgca

SEQ ID NO: 7808 - DNA, 50 bp, Homo sapiens
tcctcaactcggagattcctgtatggagagaatcaatttctatatttgca

SEQ ID NO: 7809 - DNA, 50 bp, Homo sapiens
acatttcttaggtgtgtagtggtgaaggaaaatagtggaagatgtctgca

SEQ ID NO: 7810 - DNA, 50 bp, Homo sapiens
tcaggaggcttgaaaagactcaaggtttctacactatgggaaataaggca

SEQ ID NO: 7811 - DNA, 50 bp, Homo sapiens
gttttcacttgtgatactaactattgtttttctcccccatgccaagagca

SEQ ID NO: 7812 - DNA, 50 bp, Homo sapiens
agccaagggagcatattattctcttattttaaacctctccgtaggcagca

SEQ ID NO: 7813 - DNA, 50 bp, Homo sapiens
agaaggacccctggttgagaaccacggttgtatagaaaggaattgaagca

SEQ ID NO: 7814 - DNA, 50 bp, Homo sapiens
ttgactgccatagccaagagttaatatagttgcgttttcttaaggaagca

SEQ ID NO: 7815 - DNA, 50 bp, Homo sapiens
cttactgtgcttttaggttttgttgctttctgtctgtatgctatgttcca

SEQ ID NO: 7816 - DNA, 50 bp, Homo sapiens
tgcagttaggagtgtggacactctgcccatctccattgaattaaattcca

SEQ ID NO: 7817 - DNA, 50 bp, Homo sapiens
acttgggttctatccccacgataacttgttatgtatatgccaatatccca

SEQ ID NO: 7818 - DNA, 50 bp, Homo sapiens
agctagaaaatgtccctttttcttctttggaggtctttaaccaaggccca

SEQ ID NO: 7819 - DNA, 50 bp, Homo sapiens
atcaccaatcttatttagcactgtggatgccgttttgcaaatgtcaccca

SEQ ID NO: 7820 - DNA, 50 bp, Homo sapiens
tgacttaaggttggaatatctcctactactcccctgtcctccttggacca

SEQ ID NO: 7821 - DNA, 50 bp, Homo sapiens
tgtggtttgcaatggtttactgatgagacagcaaaaatgagacaggacca

SEQ ID NO: 7822 - DNA, 50 bp, Homo sapiens
tggcgagccagtctctggatgggattctgatcaacagaagttctcataca

SEQ ID NO: 7823 - DNA, 50 bp, Homo sapiens
tgcccatcctttgctgtttttctctttcagtcatggcctatttggagaca

SEQ ID NO: 7824 - DNA, 50 bp, Homo sapiens
ctcaaccttggccctaaactaacagtgacagggagttccccagcctcaca

SEQ ID NO: 7825 - DNA, 50 bp, Homo sapiens
tcctgaccgttgacagagagcttttacagaagtcttaggcagtacacaca

SEQ ID NO: 7826 - DNA, 50 bp, Homo sapiens
agtgtgtggcacccagggatcactgtatgagaatttcctgaacaacaaca

SEQ ID NO: 7827 - DNA, 50 bp, Homo sapiens
gctgtaagtcccttccttactcatcttccctctcaaatacaacaacaaca

SEQ ID NO: 7828 - DNA, 50 bp, Homo sapiens
gccagttggcaccatttatgaaacacaccaccttgtaaccactgaattaa

SEQ ID NO: 7829 - DNA, 50 bp, Homo sapiens
tcaacctagcacagtgcctggctgataggtgttgaatatttccactctaa

SEQ ID NO: 7830 - DNA, 50 bp, Homo sapiens
gcaaccctctgcccctgcaaagagatattgtgacaaagatattcactgaa

SEQ ID NO: 7831 - DNA, 50 bp, Homo sapiens
taacattcctggcacagtccctggcatagggtagataataaatggtggaa

SEQ ID NO: 7832 - DNA, 50 bp, Homo sapiens
tctctaaccatcaaggaaggtcaagggccatgtatctcttttagggagaa

SEQ ID NO: 7833 - DNA, 50 bp, Homo sapiens
ttccacaaactcaggtgtgcaagaaacaatgcattactttattttcagaa

SEQ ID NO: 7834 - DNA, 50 bp, Homo sapiens
caggagtttgagaccagcctgggcaacatagtaagtctccatctcttcaa

SEQ ID NO: 7835 - DNA, 50 bp, Homo sapiens
tccctagtcctggagactcgggaactaaaacaatcaattcccctgagcaa

SEQ ID NO: 7836 - DNA, 50 bp, Homo sapiens
tcctcttcattggagacccctccctgtcacagcacaatgtgggtaataaa

SEQ ID NO: 7837 - DNA, 50 bp, Homo sapiens
cagaacaaggcccacagtgtgaaaggtgctgctgaacaaagataaataaa

SEQ ID NO: 7838 - DNA, 50 bp, Homo sapiens
gagtcagcaacactggtcctcttgccttggttgatgcttttgaactgaaa

SEQ ID NO: 7839 - DNA, 50 bp, Homo sapiens
taaggatgtatccctatgggcaggaaacccaattctaagaaacttacaaa

SEQ ID NO: 7840 - DNA, 50 bp, Homo sapiens
gccactgcactccagcctgggcaacagagcgagaccttgactctttaaaa

SEQ ID NO: 7841 - DNA, 50 bp, Homo sapiens
cacaacacccaaaaggctgcattgcataacatgtatttgttgaatgaaaa

SEQ ID NO: 7842 - DNA, 50 bp, Homo sapiens
ggggtccttgctcacagagctcccaagatggtggtgggccacttccaaaa

SEQ ID NO: 7843 - DNA, 50 bp, Homo sapiens
tccctctataggtaaaagacctgtttgtctgaaatgtgtggaacctgtct

SEQ ID NO: 7844 - DNA, 50 bp, Homo sapiens
gctgccgtgtcttttggcattttcagcatgactatatgtttttgtaatgt

SEQ ID NO: 7845 - DNA, 50 bp, Homo sapiens
ccgaaggcccgtgtggcgcttctcctattctgtagagtggtagtttgttt

SEQ ID NO: 7846 - DNA, 50 bp, Homo sapiens
aaagaggtaaacgcaagttctctcttgtaggtcgggctacaggtgacttt

SEQ ID NO: 7847 - DNA, 50 bp, Homo sapiens
tggttctcagcctgggtgaacagagaaggggtctaatttggtcttttgtt

SEQ ID NO: 7848 - DNA, 50 bp, Homo sapiens
tgttcttggcaccctgcactgtcaggctatatcatttctgtttgtttctt

SEQ ID NO: 7849 - DNA, 50 bp, Homo sapiens
tctcattttcttttcctagctgtgatgcaaagtgtcagtggtcccatctt

SEQ ID NO: 7850 - DNA, 50 bp, Homo sapiens
tgtccaaccttccttttgctacaaacaaagaatgcctagggattcaactt

SEQ ID NO: 7851 - DNA, 50 bp, Homo sapiens
caagtggccttggtgtttaaatcttgccctaaattgtaactcacatgatt

SEQ ID NO: 7852 - DNA, 50 bp, Homo sapiens
accaaccagtggtgtgctggagctgtctcatactatcttgagagtccatt

SEQ ID NO: 7853 - DNA, 50 bp, Homo sapiens
agcacttgctttgttccagacattgtccttagctcctttcttgtgtaatt

SEQ ID NO: 7854 - DNA, 50 bp, Homo sapiens
tgcagcaaaaattgaatttcataggccattcagtgttctctgcgataatt

SEQ ID NO: 7855 - DNA, 50 bp, Homo sapiens
ccaggaatggaaatacgccaacccaggttaggcacctctattgcagaatt

SEQ ID NO: 7856 - DNA, 50 bp, Homo sapiens
aggaaattggttgaagtcgtttttctcttgttagtctcatgttaagctgt

SEQ ID NO: 7857 - DNA, 50 bp, Homo sapiens
tcgcctggggagaatttaaaatctaagtcgctggaagtccctttgtatgt

SEQ ID NO: 7858 - DNA, 50 bp, Homo sapiens
acctgtaggaagggtttgtgaatattctgttgctctgaattattagcggt

SEQ ID NO: 7859 - DNA, 50 bp, Homo sapiens
tgagaggatcttgagacattcttgtgttatttgccctctatgttttaggt

SEQ ID NO: 7860 - DNA, 50 bp, Homo sapiens
tcccaagcatgagacaagtaccaccagtggttcaggagatgattttaggt

SEQ ID NO: 7861 - DNA, 50 bp, Homo sapiens
acaagacagcagccttcccgaaatgtcactactaagaattattcagaggt

SEQ ID NO: 7862 - DNA, 50 bp, Homo sapiens
gctgcccaaacttccatttatttaccctccaaacatcacttccttcctct

SEQ ID NO: 7863 - DNA, 50 bp, Homo sapiens
acatttgccaatgcacttgatgtaaagttgttgaggatgttgactctcct

SEQ ID NO: 7864 - DNA, 50 bp, Homo sapiens
tcccccttcctaacaccaatttgggaacatcactacttgtatattatcct

SEQ ID NO: 7865 - DNA, 50 bp, Homo sapiens
tcaagacccttagagtaagttaactcccaaggaaatgtagttagttccct

SEQ ID NO: 7866 - DNA, 50 bp, Homo sapiens
aacccacaatccaactcccttgatgaggatgatcattaacaacaatcact

SEQ ID NO: 7867 - DNA, 50 bp, Homo sapiens
tttgaagcctctggtacttccccttcccaaacccagtcacaggaaacact

SEQ ID NO: 7868 - DNA, 50 bp, Homo sapiens
ttggaggttaacagtattcctttgagtggtgtgattaaaggtgcttttat

SEQ ID NO: 7869 - DNA, 50 bp, Homo sapiens
ccaacctccagaactgcctatctaactcatctgtggtgatggaatgctat

SEQ ID NO: 7870 - DNA, 50 bp, Homo sapiens
agtggctctctgctgttagcatggttactaatcttttggttacttttcat

SEQ ID NO: 7871 - DNA, 50 bp, Homo sapiens
tgacctcagtgtctacttcagcagaacctgtgggtatatgcctacctcat

SEQ ID NO: 7872 - DNA, 50 bp, Homo sapiens
aaggagaactgtcaactgaatctcaaatgcagtcaaatgaagagaggcat

SEQ ID NO: 7873 - DNA, 50 bp, Homo sapiens
ttcaagtcattataggtttgggcatacagggttaaccttgtgatgtacat

SEQ ID NO: 7874 - DNA, 50 bp, Homo sapiens
agcagaacaacatgtgtttgacacttttccttctctgtaatgaggtacat

SEQ ID NO: 7875 - DNA, 50 bp, Homo sapiens
tgcctgtgtgggtcaaaggaatcatctatgctaatgtatttgagccaaat

SEQ ID NO: 7876 - DNA, 50 bp, Homo sapiens
accgaaagcagcattttcaatgtttaattaaatcgatgcaggaaattgtg

SEQ ID NO: 7877 - DNA, 50 bp, Homo sapiens
gtccctggcccttcactcttcgtccaggctctctgacctctttccctctg

SEQ ID NO: 7878 - DNA, 50 bp, Homo sapiens
tgtccgctgttttacctcactgctcctgtttatgcccttaacttctgctg

SEQ ID NO: 7879 - DNA, 50 bp, Homo sapiens
gcacaagacctcacttggaacaagtaccaggcagaagagagcattacctg

SEQ ID NO: 7880 - DNA, 50 bp, Homo sapiens
tttcatatcttggcagttggatgcggtaagagccacagagaaaccacctg

SEQ ID NO: 7881 - DNA, 50 bp, Homo sapiens
aggacccttttcccatatttctggctatatacaaggatatccagacactg

SEQ ID NO: 7882 - DNA, 50 bp, Homo sapiens
accaggcctagaatttaggttctaggtgtaaactattggcctatcagatg

SEQ ID NO: 7883 - DNA, 50 bp, Homo sapiens
gtgcattttagcaacagacttccaggtttccagcgcgggccaggaagggg

SEQ ID NO: 7884 - DNA, 50 bp, Homo sapiens
ctgtcatgcaccacctcatcccctccttcagggccagggacagtccctag

SEQ ID NO: 7885 - DNA, 50 bp, Homo sapiens
agaggaggagggggtagaatgaatttcatttaaagctcaacctagttcag

SEQ ID NO: 7886 - DNA, 50 bp, Homo sapiens
cagtctcccagctttcttggcctcctctgccaactggatgcaaggctcag

SEQ ID NO: 7887 - DNA, 50 bp, Homo sapiens
tggagagaaggttcgggaagacgagggggctgggaggtttggaaagacag

SEQ ID NO: 7888 - DNA, 50 bp, Homo sapiens
ctgaaatgggggaaggtgggttatgacaaagttcatggagaggcctgaag

SEQ ID NO: 7889 - DNA, 50 bp, Homo sapiens
taaagcggtacgggattccgcaccctactccagcaagaaagagcctgaag

SEQ ID NO: 7890 - DNA, 50 bp, Homo sapiens
agcattcattcctccaaacacactcccagggttaggtctcttacctctgc

SEQ ID NO: 7891 - DNA, 50 bp, Homo sapiens
ggtgttgaatatttatacggattggcatcataagataccgcgatacctgc

SEQ ID NO: 7892 - DNA, 50 bp, Homo sapiens
accttagtctaactgccttctgtaaagtgggttgctatagtctttaagcc

SEQ ID NO: 7893 - DNA, 50 bp, Homo sapiens
tgaggtttggatggtggcaggtaaaacagaaaggcaagatgtcatctgac

SEQ ID NO: 7894 - DNA, 50 bp, Homo sapiens
tggagctgctacataattatttcaggtctcaaagcttccaagaagtggac

SEQ ID NO: 7895 - DNA, 50 bp, Homo sapiens
agacggaacctgagatgttggatgttgttgatcttagcaaacagacttta

SEQ ID NO: 7896 - DNA, 50 bp, Homo sapiens
agatctgtaatctttggcaaatggaactcacctgcaacgatacctactta

SEQ ID NO: 7897 - DNA, 50 bp, Homo sapiens
gaggacttccattccccatttcccgcatacctgctgttctgtctgaatta

SEQ ID NO: 7898 - DNA, 50 bp, Homo sapiens
agctcacacctgttccttcatgggtcagttcctttcattttcacttttga

SEQ ID NO: 7899 - DNA, 50 bp, Homo sapiens
agctgctgcttctctttcagttgcaaatgcaaacctgttataatctttga

SEQ ID NO: 7900 - DNA, 50 bp, Homo sapiens
tcaatatctgtgtgtcttttcatgagtggctgttacttgtgaagaattga

SEQ ID NO: 7901 - DNA, 50 bp, Homo sapiens
tgagtggactgaggaatgaatagaaaacgtggatatatgtagaaagctga

SEQ ID NO: 7902 - DNA, 50 bp, Homo sapiens
accagcccctgggaatgttatgagcaaatgatactccatgagtaaaatga

SEQ ID NO: 7903 - DNA, 50 bp, Homo sapiens
tcgtgtgagtgtgagagacatgttcattgtgaaaagatactcctagtgga

SEQ ID NO: 7904 - DNA, 50 bp, Homo sapiens
tttgtcaaatgcctgttcaccatctgtggaagtcattatatgattcagga

SEQ ID NO: 7905 - DNA, 50 bp, Homo sapiens
acacttttcttctaaggagagctttcttaggcatttcaaagaactttcga

SEQ ID NO: 7906 - DNA, 50 bp, Homo sapiens
accaaatgagtaccatctgttgaacacagggtggcgatccaagtgtttca

SEQ ID NO: 7907 - DNA, 50 bp, Homo sapiens
acctgacttccacgataaaatggagatgagtgcaggggtgagtgtatagt

SEQ ID NO: 7908 - DNA, 50 bp, Homo sapiens
tgcagatttatactcctgacgtgtctcattcacagctaaataataggcca

SEQ ID NO: 7909 - DNA, 50 bp, Homo sapiens
accctcgccctttccctccggttcagtacctattgtttctcctttcaaat

SEQ ID NO: 7910 - DNA, 50 bp, Homo sapiens
aagaggaaatggcagaattaaaagcagaaacaagaagatggacatggatt

SEQ ID NO: 7911 - DNA, 50 bp, Homo sapiens
aagagtgtttgagtgcttgtcatcaggtgttttccttaataagtagggat

SEQ ID NO: 7912 - DNA, 50 bp, Homo sapiens; identical to SEQ ID NO: 2584

SEQ ID NO: 7913 - DNA, 50 bp, Homo sapiens
ttccttggattcatttcacttggctagaaattacactgtgctcaatgcct

SEQ ID NO: 7914 - DNA, 50 bp, Homo sapiens
aggtctctgccacctccttctctgtgagctgtcagtctaggttattctct

SEQ ID NO: 7915 - DNA, 50 bp, Homo sapiens
gaataggagggacatggaaccatttgcctctggctgtgtcacagggtgag

SEQ ID NO: 7916 - DNA, 50 bp, Homo sapiens; identical to SEQ ID NO: 507

SEQ ID NO: 7917 - DNA, 50 bp, Homo sapiens
tttcactttcacacttcatctcattcctgttgtcactttccccgaaacga

SEQ ID NO: 7918 - DNA, 50 bp, Homo sapiens
tctggatcaatagcttcccctctagggtctactgatgagtcaaatctaaa

SEQ ID NO: 7919 - DNA, 50 bp, Homo sapiens
tttatctactgtgtgttgtggtggcctgttggaggcaaatagatcagatt

SEQ ID NO: 7920 - DNA, 50 bp, Homo sapiens
gacatttttgtaggatgcctgacgaggtgtagccttttatcttgtttccg

SEQ ID NO: 7921 - DNA, 50 bp, Homo sapiens
cccagtttgtggaagcacaggcaagagtgttcttttctggtgattctcca

SEQ ID NO: 7922 - DNA, 50 bp, Homo sapiens
tgttccttttcctgactcctccttgcaaacaaaatgatagttgacacttt

SEQ ID NO: 7923 - DNA, 50 bp, Homo sapiens
gtgacttgtacattcagcaatagcatttgagcaagttttatcagcaagca

SEQ ID NO: 7924 - DNA, 50 bp, Homo sapiens
ttgctatcgacattcccgtataaagagagagacatatcacgctgctgtca

SEQ ID NO: 7925 - DNA, 50 bp, Homo sapiens; identical to SEQ ID NO: 618

SEQ ID NO: 7926 - DNA, 50 bp, Homo sapiens; identical to SEQ ID NO: 7197

SEQ ID NO: 7927 - DNA, 50 bp, Homo sapiens; identical to SEQ ID NO: 619

SEQ ID NO: 7928 - DNA, 50 bp, Homo sapiens
tgtgattaggttgttttcctgtcatttttgagagactaaaattgtggggg

SEQ ID NO: 7929 - DNA, 50 bp, Homo sapiens; identical to SEQ ID NO: 7260

SEQ ID NO: 7930 - DNA, 50 bp, Homo sapiens
aacaagatgagaacagataaagattgtgtggtgttttggatttggagaga

SEQ ID NO: 7931 - DNA, 50 bp, Homo sapiens
tgtagctcccacaaggtaaacttcattggtaagattgcactgttctgatt

SEQ ID NO: 7932 - DNA, 50 bp, Homo sapiens
tcactcccccatttcacttctttgtcagagaatagttcttgttcatactg

SEQ ID NO: 7933 - DNA, 50 bp, Homo sapiens
tgggagtgacaaacattctctcatcctacttagcctacctagatttctca

SEQ ID NO: 7934 - DNA, 50 bp, Homo sapiens; identical to SEQ ID NO: 648

SEQ ID NO: 7935 - DNA, 50 bp, Homo sapiens
ccccagcctaaagcagggatcagtcttttcttgtggaataaatccttgga

SEQ ID NO: 7936 - DNA, 50 bp, Homo sapiens
tgtggtaatgcctgttttcatctgtaaatagttaagtatgtacacgaggc

SEQ ID NO: 7937 - DNA, 50 bp, Homo sapiens
agatgcttagtccctcatgcaaatcaattactggtccaaaagattgctga

SEQ ID NO: 7938 - DNA, 50 bp, Homo sapiens
aaaactgctcttctgctctagtaccatgcttagtgcaaatgattatttct

SEQ ID NO: 7939 - DNA, 50 bp, Homo sapiens
agctattaggatcttcaacccaggtaacaggaataattctgtggtttcat

SEQ ID NO: 7940 - DNA, 50 bp, Homo sapiens
tcctgcgtctatccatgtggaatgctggacaataaagcgagtgctgccca

SEQ ID NO: 7941 - DNA, 50 bp, Homo sapiens; identical to SEQ ID NO: 4805

SEQ ID NO: 7942 - DNA, 50 bp, Homo sapiens
actgctttgactggtgggtctctagaagcaaaactgagtgataactcatg

SEQ ID NO: 7943 - DNA, 50 bp, Homo sapiens
ggcattgtctctgtttcccagtggggtggacagtatatcagatggtcaga

SEQ ID NO: 7944 - DNA, 50 bp, Homo sapiens
ccctgggctaccatctgcatggggctggggtcctcctgtgctatttgtac

SEQ ID NO: 7945 - DNA, 50 bp, Homo sapiens; identical to SEQ ID NO: 727

SEQ ID NO: 7946 - DNA, 50 bp, Homo sapiens
tcttggcagccatcctttttaagagtaagttggttacttcaaaaagagca

SEQ ID NO: 7947 - DNA, 50 bp, Homo sapiens
agctaaagagagggaacctcatctaagtaacatttgcacatgatacagca

SEQ ID NO: 7948 - DNA, 50 bp, Homo sapiens
gctgagtgctggccctctgcgtcttccttattaaccttgaatcctcatta

SEQ ID NO: 7949 - DNA, 50 bp, Homo sapiens; identical to SEQ ID NO: 768

SEQ ID NO: 7950 - DNA, 50 bp, Homo sapiens
tccgggccaagaatttttatccatgaagactttcctacttttctcggtgt

SEQ ID NO: 7951 - DNA, 50 bp, Homo sapiens
gcagagttcattgttgccccttaacagtttttcctgagtttactgaagaa

SEQ ID NO: 7952 - DNA, 50 bp, Homo sapiens
ttatcaagcagagacctttgttgggaggcggtttgggagaacacatttct

SEQ ID NO: 7953 - DNA, 50 bp, Homo sapiens
gggtatgctgcctctgtaaattcatgtattcaaaggaaaagacaccttgc

SEQ ID NO: 7954 - DNA, 50 bp, Homo sapiens
ttgtctgccccacaatcaagaatgtatgtgtaaagtgtgaataaatctca

SEQ ID NO: 7955 - DNA, 50 bp, Homo sapiens; identical to SEQ ID NO: 2677

SEQ ID NO: 7956 - DNA, 50 bp, Homo sapiens
agcagtttgtgatatagcagaggtttaaatgtaccctccccttttatgca

SEQ ID NO: 7957 - DNA, 50 bp, Homo sapiens
tgatgctgcccattccactgaagttctgaaatctttcgtcatgtaaataa

SEQ ID NO: 7958 - DNA, 50 bp, Homo sapiens; identical to SEQ ID NO: 2256

SEQ ID NO: 7959 - DNA, 50 bp, Homo sapiens; identical to SEQ ID NO: 864

SEQ ID NO: 7960 - DNA, 50 bp, Homo sapiens
gccaggctggttccgcatggtgatctccgtcttgtatgtctgaatgttgg

SEQ ID NO: 7961 - DNA, 50 bp, Homo sapiens
ctatttccaaggcccctccctgtttccccagcaattaaaacggactcatc

SEQ ID NO: 7962 - DNA, 50 bp, Homo sapiens
aaagtgccagaatgactcttctgtgcattcttcttaaagagctgcttggt

SEQ ID NO: 7963 - DNA, 50 bp, Homo sapiens; identical to SEQ ID NO: 7644

SEQ ID NO: 7964 - DNA, 50 bp, Homo sapiens
agtcctgtatcatccatacttgtactaccttgtcctatgaagctctgaga

SEQ ID NO: 7965 - DNA, 50 bp, Homo sapiens
ttggccgcttccctacccacagggcctgacttttacagcttttctctttt

SEQ ID NO: 7966 - DNA, 50 bp, Homo sapiens
tatgacacagcagctcctttgtaagtaccaggtcatgtccatcccttggt

SEQ ID NO: 7967 - DNA, 50 bp, Homo sapiens; identical to SEQ ID NO: 1204

SEQ ID NO: 7968 - DNA, 50 bp, Homo sapiens
tgcatagatgacctttggattattggactctgactattgggaccctaaat

SEQ ID NO: 7969 - DNA, 50 bp, Homo sapiens
tggacgccctaagaaacagagaaaacagaaataacaaccaggaactgctt

SEQ ID NO: 7970 - DNA, 50 bp, Homo sapiens
caatagcttgtgggtctgtgaagactgcggtgtttgagtttctcacaccc

SEQ ID NO: 7971 - DNA, 50 bp, Homo sapiens
tgcactgtactctcttcataggattgtaaaggtgttctaatccaattgca

SEQ ID NO: 7972 - DNA, 50 bp, Homo sapiens
tgaagtcatttcattgggaaggaaagctgcaaagattattgggggactag

SEQ ID NO: 7973 - DNA, 50 bp, Homo sapiens
tttcatctggcccaccctccttagactctcctcccttcaagagttggagc

SEQ ID NO: 7974 - DNA, 50 bp, Homo sapiens
gtgtagaattcggatccagtcatctcacagaactttccactagggtgcca

SEQ ID NO: 7975 - DNA, 50 bp, Homo sapiens
cggaccccagtttcttgtaccaagggggaaacatgcggggaccccaatgg

SEQ ID NO: 7976 - DNA, 50 bp, Homo sapiens; identical to SEQ ID NO: 1511

SEQ ID NO: 7977 - DNA, 50 bp, Homo sapiens
aacacaacactaaaaccgaacacacacgtactaacacacccacgacccaa

SEQ ID NO: 7978 - DNA, 50 bp, Homo sapiens
ccttctggttctgcttttgaccagcatttttgtgcccctctgttactgtg

SEQ ID NO: 7979 - DNA, 50 bp, Homo sapiens
gatatacgaaacacaccactggacgatgcgaaaaacgagacgacataagc

SEQ ID NO: 7980 - DNA, 50 bp, Homo sapiens
tggacaggcatgaaaggttacaaatgggagaaaactcacacacgttatgt

SEQ ID NO: 7981 - DNA, 50 bp, Homo sapiens
gcaggagagcgagagaggagaagaagaggcaggagggagaaagagcgtac

SEQ ID NO: 7982 - DNA, 50 bp, Homo sapiens; identical to SEQ ID NO: 3889

SEQ ID NO: 7983 - DNA, 50 bp, Homo sapiens
agaggaaagaataggaccagtgccgaggtatagggaggagggcatactaa

SEQ ID NO: 7984 - DNA, 50 bp, Homo sapiens
tcggagtaagggcgattgtctcgttaggtaatacatcatcttcgtgcata

SEQ ID NO: 7985 - DNA, 50 bp, Homo sapiens
agacaagacgagcaacgacaaccacagcagctccatacactctgcctctc

SEQ ID NO: 7986 - DNA, 50 bp, Homo sapiens; identical to SEQ ID NO: 2595

SEQ ID NO: 7987 - DNA, 50 bp, Homo sapiens; identical to SEQ ID NO: 1567

SEQ ID NO: 7988 - DNA, 50 bp, Homo sapiens; identical to SEQ ID NO: 1572

SEQ ID NO: 7989 - DNA, 50 bp, Homo sapiens
cgtgccagatataactgtcttgtttcagtgagagacgccctatttctatg

SEQ ID NO: 7990 - DNA, 50 bp, Homo sapiens
tccctgaggcttgtgtatgttggatattgtggtgttttagatcactgagt

SEQ ID NO: 7991 - DNA, 50 bp, Homo sapiens
cagagaagaaacctactacagaggagaagaagcctgctgcataaactctt

SEQ ID NO: 7992 - DNA, 50 bp, Homo sapiens
tcagaacatagatatgtattcagcttgtcttcaaatacggccaagcagaa

SEQ ID NO: 7993 - DNA, 50 bp, Homo sapiens
ttggggtcaagtgaaagggtagggggatagtcctgatcaagtgtgataaa

SEQ ID NO: 7994 - DNA, 50 bp, Homo sapiens; identical to SEQ ID NO: 1626

SEQ ID NO: 7995 - DNA, 50 bp, Homo sapiens
ccttctcttcatgtgtgtaaatctgtaatataccattctctgtggcctgt

SEQ ID NO: 7996 - DNA, 50 bp, Homo sapiens
ggatggcacttccccaccggatggacagttattttgttgataagtaaccc

SEQ ID NO: 7997 - DNA, 50 bp, Homo sapiens
tgagtcagtgtctttactgagctggaagcctctgaaagttattaaaggca

SEQ ID NO: 7998 - DNA, 50 bp, Homo sapiens; identical to SEQ ID NO: 1636

SEQ ID NO: 7999 - DNA, 50 bp, Homo sapiens
gtggcttgctagtctgttacgttaacatgcttttctaaaattgcttcacg

SEQ ID NO: 8000 - DNA, 50 bp, Homo sapiens
ttgtactcactgggctgtgctctcccctgtttacccgatgtatggaaata

SEQ ID NO: 8001 - DNA, 50 bp, Homo sapiens; identical to SEQ ID NO: 2774

SEQ ID NO: 8002 - DNA, 50 bp, Homo sapiens
ttgttgttttccctgatttagcaagcaagtaattttctcccaagctgatt

SEQ ID NO: 8003 - DNA, 50 bp, Homo sapiens
ttagaaacaaaaagagctttccttctccaggaatactgaacatgggagct

SEQ ID NO: 8004 - DNA, 50 bp, Homo sapiens; identical to SEQ ID NO: 2180

SEQ ID NO: 8005 - DNA, 50 bp, Homo sapiens
gatgtctggtgcccaatcccaggaagtgagagccatttcttttgtactgg

SEQ ID NO: 8006 - DNA, 50 bp, Homo sapiens
agttggactaaatgctcttccttcagaggattatccggggcatctactca

SEQ ID NO: 8007 - DNA, 50 bp, Homo sapiens; identical to SEQ ID NO: 1736

SEQ ID NO: 8008 - DNA, 50 bp, Homo sapiens
aaacacatacacacaaaacagcaaacttcaggtaactattttggattgca

SEQ ID NO: 8009 - DNA, 50 bp, Homo sapiens
ctgaggatgagctggaaggagtgagaggggacaaaacccaccttgttgga

SEQ ID NO: 8010 - DNA, 50 bp, Homo sapiens; identical to SEQ ID NO: 7353

SEQ ID NO: 8011 - DNA, 50 bp, Homo sapiens; identical to SEQ ID NO: 1465

SEQ ID NO: 8012 - DNA, 50 bp, Homo sapiens; identical to SEQ ID NO: 1777

SEQ ID NO: 8013 - DNA, 50 bp, Homo sapiens; identical to SEQ ID NO: 4556

SEQ ID NO: 8014 - DNA, 50 bp, Homo sapiens
ggacagcccacagggaggtggtggacggactgtaattgatagattgatta

SEQ ID NO: 8015 - DNA, 50 bp, Homo sapiens
attgaagccgactctggccctggcccttacttgcttctctagctctctag

SEQ ID NO: 8016 - DNA, 50 bp, Homo sapiens
actagactttatgccatggtgctttcagtttaatgctgtgtctctgtcag

SEQ ID NO: 8017 - DNA, 50 bp, Homo sapiens
gagccatatgaaagagaccatgccgtggtcgtgggagtgtacaggccacc

SEQ ID NO: 8018 - DNA, 50 bp, Homo sapiens
ataacagactccagctcctggtccacccggcatgtcagtcagcactctgg

SEQ ID NO: 8019 - DNA, 50 bp, Homo sapiens
ctggcctctgtgtcctagaagggaccctcctgtggtctttgtcttgattt

SEQ ID NO: 8020 - DNA, 50 bp, Homo sapiens
cccaaagctcactttacaaaatatttcctcagtactttgcagaaaacacc

SEQ ID NO: 8021 - DNA, 50 bp, Homo sapiens
atgtctgctagaaagtgttgtagttgattgaccaaaccagttcataaggg

SEQ ID NO: 8022 - DNA, 50 bp, Homo sapiens
ctctgcatgttctgctcttgtgcccttctgagcccacaataaaggctgag

SEQ ID NO: 8023 - DNA, 50 bp, Homo sapiens
tgcatcgtaaaacctttcagaaggaaaggagaatgttttgtggacacgtt

SEQ ID NO: 8024 - DNA, 50 bp, Homo sapiens
agccctattcatgtctctacccactatgcacagattaaacttcacctaca

SEQ ID NO: 8025 - DNA, 50 bp, Homo sapiens
agtgacagtgaacttaagcaaattaccctcctacccaattctatggaata

SEQ ID NO: 8026 - DNA, 50 bp, Homo sapiens
acacatgccctgaatgaattgctaaatttcaaaggaaatggaccctgctt

SEQ ID NO: 8027 - DNA, 50 bp, Homo sapiens
gccactgaaccaatcactttgtatgctatgctcctactgtgatggaaaac

SEQ ID NO: 8028 - DNA, 50 bp, Homo sapiens; identical to SEQ ID NO: 3262

SEQ ID NO: 8029 - DNA, 50 bp, Homo sapiens; identical to SEQ ID NO: 4798

SEQ ID NO: 8030 - DNA, 50 bp, Homo sapiens
gctccatgttctgacttagggcaatttgattctgcacttggggtctgtct

SEQ ID NO: 8031 - DNA, 50 bp, Homo sapiens
gcagcagcttaatttttctgtattgcagtgtttataggcttcttgtgtgt

SEQ ID NO: 8032 - DNA, 50 bp, Homo sapiens; identical to SEQ ID NO: 106

SEQ ID NO: 8033 - DNA, 50 bp, Homo sapiens; identical to SEQ ID NO: 8024

SEQ ID NO: 8034 - DNA, 50 bp, Homo sapiens
acatggaagactaaactcatgcttattgctaaatgtggtctttgccaact

SEQ ID NO: 8035 - DNA, 50 bp, Homo sapiens
agacccctgtgatgcctgtgacctcaattaaagcaattcctttgacctgt

SEQ ID NO: 8036 - DNA, 50 bp, Homo sapiens; identical to SEQ ID NO: 2893

SEQ ID NO: 8037 - DNA, 50 bp, Homo sapiens
ctgtagactcagtgccagccacagcttcagagattgtgctcacatggtat

SEQ ID NO: 8038 - DNA, 50 bp, Homo sapiens
tgacaaaggattttacgtttataaaattatgacagaagccatgtgccccg

SEQ ID NO: 8039 - DNA, 50 bp, Homo sapiens
gtctgccctgctggctggaaacctggtagtgaaacaataatcccagatcc

SEQ ID NO: 8040 - DNA, 50 bp, Homo sapiens
ctcgtcatacaatgcctgatgggctcctgtcaccctccacgtctccacag

SEQ ID NO: 8041 - DNA, 50 bp, Homo sapiens
ctagggagccgcaccttatcatgtaccatcaataaagtaccctgtgctca

SEQ ID NO: 8042 - DNA, 50 bp, Homo sapiens
tccgtatccattacttcgacccacagtactttgaatttgagtttgaggct

SEQ ID NO: 8043 - DNA, 50 bp, Homo sapiens
ccagtcctccacacccaaactgtttctgattggcttttagctttttgttg

SEQ ID NO: 8044 - DNA, 50 bp, Homo sapiens
ctgttgtctctctgaggctgccagttgttgtgtgttaccgatgccagaag

SEQ ID NO: 8045 - DNA, 50 bp, Homo sapiens
aatatagtcaagcaagtttgttccaggtgacccattgagctgtgtatgca

SEQ ID NO: 8046 - DNA, 50 bp, Homo sapiens
tttgctattttcgtcatgcctttgagactgagtcttactccgtcccccag

SEQ ID NO: 8047 - DNA, 50 bp, Homo sapiens; identical to SEQ ID NO: 2117

SEQ ID NO: 8048 - DNA, 50 bp, Homo sapiens
caggaaggaggtaggcacctttctgagcttattctattccccacccacac

SEQ ID NO: 8049 - DNA, 50 bp, Homo sapiens
gggagccatccctctctaccaaggtggcaatgatggagggaacttgcatg

SEQ ID NO: 8050 - DNA, 50 bp, Homo sapiens
tggcccgcaatactgtaggaacaagcatgatcttgttactgtgatatttt

SEQ ID NO: 8051 - DNA, 50 bp, Homo sapiens; identical to SEQ ID NO: 2151

SEQ ID NO: 8052 - DNA, 50 bp, Homo sapiens; identical to SEQ ID NO: 4517

SEQ ID NO: 8053 - DNA, 50 bp, Homo sapiens
tggggactatagtgcaacctatttgggtaaagaaaccatttgctaaaatg

SEQ ID NO: 8054 - DNA, 50 bp, Homo sapiens; identical to SEQ ID NO: 2269

SEQ ID NO: 8055 - DNA, 50 bp, Homo sapiens; identical to SEQ ID NO: 2480

SEQ ID NO: 8056 - DNA, 50 bp, Homo sapiens
gaggaggttgcccagaagaaaaagatatcccagaagaaactgaagaaaca

SEQ ID NO: 8057 - DNA, 50 bp, Homo sapiens
aacctaccagcccttctcccccaataactgtgggtctatacagagtcaat

SEQ ID NO: 8058 - DNA, 50 bp, Homo sapiens
agagagttggaccactattgtgtgttgctaatcattgactgtagtcccaa

SEQ ID NO: 8059 - DNA, 50 bp, Homo sapiens
ccctgtactgctgctgcgacctgatgctgccagtctgttaaaataaagat

SEQ ID NO: 8060 - DNA, 50 bp, Homo sapiens; identical to SEQ ID NO: 2106

SEQ ID NO: 8061 - DNA, 50 bp, Homo sapiens; identical to SEQ ID NO: 106

SEQ ID NO: 8062 - DNA, 50 bp, Homo sapiens; identical to SEQ ID NO: 2926

SEQ ID NO: 8063 - DNA, 50 bp, Homo sapiens
tctctgctcaatctctgcttggctccaaggacctgggatctcctggtacg

SEQ ID NO: 8064 - DNA, 50 bp, Homo sapiens
tgtcttactcaagttcaaacctccagcctgtgaatcaactgtgtctcttt

SEQ ID NO: 8065 - DNA, 50 bp, Homo sapiens; identical to SEQ ID NO: 4159

SEQ ID NO: 8066 - DNA, 50 bp, Homo sapiens
tggtgagtggaatttgacattgtccaaacctttttcatttttgagtgatt

SEQ ID NO: 8067 - DNA, 50 bp, Homo sapiens
gagtgaggaagacccccaagcatagactcgggtactgtgatgatggctgc

SEQ ID NO: 8068 - DNA, 50 bp, Homo sapiens
tggcaaagcccctcacactgcaagggattgtagataacactgacttgttt

SEQ ID NO: 8069 - DNA, 50 bp, Homo sapiens
ggaaaggaaactttgaaccttatgtaccgagcaaatgccaggtctagcaa

SEQ ID NO: 8070 - DNA, 50 bp, Homo sapiens
agttaagattattcagaaggtcggggattggagctaagctgccacctggt

SEQ ID NO: 8071 - DNA, 50 bp, Homo sapiens
ttaccttgtggatgctagtgctgtagagttcactgttgtacacagtctgt

SEQ ID NO: 8072 - DNA, 50 bp, Homo sapiens
ggggtcttcacattatcataacctctcctctaaaggggaggcattaaaat

SEQ ID NO: 8073 - DNA, 50 bp, Homo sapiens
tttccttgtgcaattcagacttaagcatcgagtttttaccatcttccact

SEQ ID NO: 8074 - DNA, 50 bp, Homo sapiens; identical to SEQ ID NO: 3840

SEQ ID NO: 8075 - DNA, 50 bp, Homo sapiens
aaatgtagcttttggggagggaggggaaatgtaatactggaataatttgt

SEQ ID NO: 8076 - DNA, 50 bp, Homo sapiens
acccactgcaaaagtagtagtcaagtgtctaggtctttgatattgctctt

SEQ ID NO: 8077 - DNA, 50 bp, Homo sapiens
gcctgctgtgaactgctttccctcggaatgtttccgtaacaggacattaa

SEQ ID NO: 8078 - DNA, 50 bp, Homo sapiens; identical to SEQ ID NO: 2582

SEQ ID NO: 8079 - DNA, 50 bp, Homo sapiens; identical to SEQ ID NO: 2817

SEQ ID NO: 8080 - DNA, 50 bp, Homo sapiens; identical to SEQ ID NO: 3865

SEQ ID NO: 8081 - DNA, 50 bp, Homo sapiens
ttgggggaaatgttgtgggggtggggttgagttgggggtattttctaatt

SEQ ID NO: 8082 - DNA, 50 bp, Homo sapiens
agcatggtaaacctgggttttgttcatattttctccagacagaaatgcaa

SEQ ID NO: 8083 - DNA, 50 bp, Homo sapiens; identical to SEQ ID NO: 887

SEQ ID NO: 8084 - DNA, 50 bp, Homo sapiens
gcccttgatgctggagtcacatctgttgatagctggagaactttagtttc

SEQ ID NO: 8085 - DNA, 50 bp, Homo sapiens
gccgattccaagcgagggatttaatccttacatttttgcccatttggctc

SEQ ID NO: 8086 - DNA, 50 bp, Homo sapiens
ttccctggacagtttgatgtgcttatggttgagatttataatctgcttgt

SEQ ID NO: 8087 - DNA, 50 bp, Homo sapiens
ggcggtgactgccccagacttggttttgtaatgatttgtacaggaataaa

SEQ ID NO: 8088 - DNA, 50 bp, Homo sapiens
tgaccatttggaggggcggggcctcctagaagaaccttcttagacaatgg

SEQ ID NO: 8089 - DNA, 50 bp, Homo sapiens
cagtcctcacaccagccaaggtcacaggcaagagcaagaagagaaactga

SEQ ID NO: 8090 - DNA, 50 bp, Homo sapiens
cctcagtgatggaatatcatgaatgtgagtcattatgtagctgtcgtaca

SEQ ID NO: 8091 - DNA, 50 bp, Homo sapiens
acacacaacttcagctttgcatcacgagtcttgtattccaagaaaatcaa

SEQ ID NO: 8092 - DNA, 50 bp, Homo sapiens
ggaatttcgcaccagaggacccaccacgtcctcgcttcgacatcttgaac

SEQ ID NO: 8093 - DNA, 50 bp, Homo sapiens; identical to SEQ ID NO: 2067

SEQ ID NO: 8094 - DNA, 50 bp, Homo sapiens
cagagaaagaaaaggcaaaagactggtttgtttgcttaatttccttctgt

SEQ ID NO: 8095 - DNA, 50 bp, Homo sapiens
gaaagcagggaagcagtgtgaactctttattcactcccagcctgtcctgt

SEQ ID NO: 8096 - DNA, 50 bp, Homo sapiens; identical to SEQ ID NO: 7214

SEQ ID NO: 8097 - DNA, 50 bp, Homo sapiens; identical to SEQ ID NO: 75

SEQ ID NO: 8098 - DNA, 50 bp, Homo sapiens; identical to SEQ ID NO: 7278

SEQ ID NO: 8099 - DNA, 50 bp, Homo sapiens
tgcaactagcaactcatcttcggaagacacagccaggagaatgaagtaga

SEQ ID NO: 8100 - DNA, 50 bp, Homo sapiens
gactttcctctctgcgagcttctacttctaagtctgaatccagtcagaaa

SEQ ID NO: 8101 - DNA, 50 bp, Homo sapiens
gtttctctttggttttccagattttctttagaacggtgactgaccctcct

SEQ ID NO: 8102 - DNA, 50 bp, Homo sapiens
ctgagcaataactagcataaccccttggggcctctaaacgggtcttgagg

SEQ ID NO: 8103 - DNA, 50 bp, Homo sapiens
tgcccatttcacattgctcattactcatgcaaatttcttcttgctaacct

SEQ ID NO: 8104 - DNA, 50 bp, Homo sapiens
acccaccattggtaaaatattcaggggaacttggtttaaaagtttatgct

SEQ ID NO: 8105 - DNA, 50 bp, Homo sapiens
gtcaaataaggttgttctttccttgaaggacagcacccatgccacagcac

SEQ ID NO: 8106 - DNA, 50 bp, Homo sapiens
ctggaaaaacatcacatggttgagtcaaggatgaaaagtcaaaactacct

SEQ ID NO: 8107 - DNA, 50 bp, Homo sapiens
atccatccaataaacacagcaacaccctatgctactgaccaagcaaagct

SEQ ID NO: 8108 - DNA, 50 bp, Homo sapiens
tagttagagtccaagacatggttcctccccctttgtctgtacatcctggc

SEQ ID NO: 8109 - DNA, 50 bp, Homo sapiens
cagcctgcctgcttgccatttttcttccccttccatttttctaacctcag

SEQ ID NO: 8110 - DNA, 50 bp, Homo sapiens
acttcctccccctccccctagcattacttatatgatatgtttccataccc

SEQ ID NO: 8111 - DNA, 50 bp, Homo sapiens; identical to SEQ ID NO: 6215

SEQ ID NO: 8112 - DNA, 50 bp, Homo sapiens
tttgcatcccgagttttgtattccaagaaaatcaaagggggccaatttgt

SEQ ID NO: 8113 - DNA, 51 bp, Homo sapiens; identical to SEQ ID NO: 5699

SEQ ID NO: 8114 - DNA, 50 bp, Homo sapiens
aaaaacggtttatgggggtagggaaacaggccgaaaagaacgtggagaaa

SEQ ID NO: 8115 - DNA, 50 bp, Homo sapiens
ggggactcaggcccccgctgggggtcccacatagggtttttatccaaaaa

SEQ ID NO: 8116 - DNA, 50 bp, Homo sapiens; identical to SEQ ID NO: 4235

SEQ ID NO: 8117 - DNA, 50 bp, Homo sapiens; identical to SEQ ID NO: 6061

SEQ ID NO: 8118 - DNA, 50 bp, Homo sapiens; identical to SEQ ID NO: 6136

SEQ ID NO: 8119 - DNA, 50 bp, Homo sapiens
agccatagaaggtgttcaggtattgcactgccaactctttgtccgttttg

SEQ ID NO: 8120 - DNA, 50 bp, Homo sapiens
ccatgcccttgtcatcaatcttgaatcccatagctgcttgaatctgctgc

SEQ ID NO: 8121 - DNA, 50 bp, Homo sapiens
ttaagaatgtggcagaaatgtatgctgaggtagcccagtcaatccttatt

SEQ ID NO: 8122 - DNA, 50 bp, Homo sapiens
atcagtagcaaaacaaacccagcaacttctgtccagcatctgctgtaggg

SEQ ID NO: 8123 - DNA, 50 bp, Homo sapiens
cccatctaactagcacacgaaccttccacgaggacgcctggcgagagaag

SEQ ID NO: 8124 - DNA, 50 bp, Homo sapiens
gaacttggcagttgtagcagaggcagttgaggcttgttgaccatcaccat

SEQ ID NO: 8125 - DNA, 50 bp, Homo sapiens
cgctctctcctgcacagcaccaccaccaacagtctggatgattttaggca

SEQ ID NO: 8126 - DNA, 50 bp, Homo sapiens
ttttgggaagaaaaccctatgcatctgaaatacaattggcaatggaagct

SEQ ID NO: 8127 - DNA, 50 bp, Homo sapiens
ctctttgttgctactcatttctctccggcgtctgctgaggggtaggtgtc

SEQ ID NO: 8128 - DNA, 50 bp, Homo sapiens
caacttcctcttggttacccagaagaacagcagcaccgtgatccagagca

SEQ ID NO: 8129 - DNA, 50 bp, Homo sapiens
ctgtacatctgcatcccagcaaagagcagcagggacaggagggaggagag

SEQ ID NO: 8130 - DNA, 50 bp, Homo sapiens
cacagacagaaggtttcgttcctcattcgacagtggctcattcagctctg

SEQ ID NO: 8131 - DNA, 50 bp, Homo sapiens
tcaagattggcaattcactgtgcccattaaaccactcagtagctcagcct

SEQ ID NO: 8132 - DNA, 50 bp, Homo sapiens
agttgtcctgagagttttacacttgtgagaaaatactggcagctttgatt

SEQ ID NO: 8133 - DNA, 50 bp, Homo sapiens
cacataggaatccttctgacccatgcccaccatcacgccctggtgcctgg

SEQ ID NO: 8134 - DNA, 50 bp, Homo sapiens
aacaggaacctttatctctttgtgaggcgatttgcattctccacacaggc

SEQ ID NO: 8135 - DNA, 50 bp, Homo sapiens
gtacttgccgccggtggcctcattgtagtacacgttgatgcgttccagct

SEQ ID NO: 8136 - DNA, 50 bp, Homo sapiens
atagtggctagggattaggaggcgaaggcgacaggagcagacaccgggtc

SEQ ID NO: 8137 - DNA, 50 bp, Homo sapiens
cattttggcttttaggggtagttttcacgacacctgtgttctggcggcaa

SEQ ID NO: 8138 - DNA, 50 bp, Homo sapiens
ccctggttcaggaattaaggggacagacttgaataagaaacaaaacaaaa

SEQ ID NO: 8139 - DNA, 50 bp, Homo sapiens
acagtagagaatttgagtacacagggtatggagagtagggcacaaaatgt

SEQ ID NO: 8140 - DNA, 50 bp, Homo sapiens
gaacagcctcgtctttccccgaatgccaggcaggatgacgatgaacgtgg

SEQ ID NO: 8141 - DNA, 50 bp, Homo sapiens
gacctccagaatttcctcatcgctgtcggtgaccaagtccacagacacta

SEQ ID NO: 8142 - DNA, 50 bp, Homo sapiens
tcttgccatcctatggaactgcctcggtgagttttctccttcattacaga

SEQ ID NO: 8143 - DNA, 50 bp, Homo sapiens
tgttactccttcaagcccctgaatcactatagccacgactctccaactga

SEQ ID NO: 8144 - DNA, 290 bp, Homo sapiens
  misc_feature (1)..(290): N=A,T,C, or G
agtcaacctaccaaagaccatacctgacacctaggctctctcacccaatggaatagactctaatggtgatacataccaataangggaaatctagtggtggtaaactgtttatgcctcattctatgaaagctgaaagattgctgttagctgtatgatgtataatgctaatcgcgatangggtacattgtcttctacagactcctacatatgtatgattatcacagtatgatgccagatactaacattcatattgaacaaatggctggcgtgggtagatgtcaagagaacat

SEQ ID NO: 8145 - DNA, 386 bp, Homo sapiens
ggcaggtggagaacacaaacgagtgagagctgactgtagtcgaagatcatacaaggaaaggtaagaaggcctgcaagctgtgaattagacataatacattattaattataggatgtaacattatgtatatggggaatatatatctaaacttatttatcaatatttaatattatatatatggggtatgtgtatgtaaacgcatatatattatatatatgtattattaataacttttgtgttatgagactgaatatctataaatatatgttttattaataattactatatgctgtgtaagtatcacgttatattttgtgtgctgactaagtaagcaacgctatgtagatacaaagagttgtgtgatggagtccactggtgatacaacg

SEQ ID NO: 8146 - DNA, 354 bp, Homo sapiens
cgagtacaagctttttttttttattttatttcttgttctggctatgatgacaaactgggtagtatatgatatatataacgtagagaagagtaacatatagacacaaaaaatatatatgagtcatgtattaactagaaatgcacataagataaaatggcctattgaatcatgtttttattatagatatattacaaaatggcattgaaggaaacctacttatttttcaatatgagaacaacagaaggcttttatgtatcacgaaaataacaatatatctgattttataatttataatttacattacataagctgagaactacacaataaaaactcaccaatattgaatattatata

SEQ ID NO: 8147 - DNA, 226 bp, Homo sapiens
atctcgaaggcaactcgcatgcacactagcaacatatataaacaatcttatattagactgtaaatggaaactgtaaagtgattagcttgaatcttttgtgcgaaagatttgtaacagacaatcgggtgaaatcacctcgcgcatgttatggagagattgtgacgttcaggacaaaacgagtaacagactgatcttctgtttgatactacgaccaggactccaggac

SEQ ID NO: 8148 - DNA, 530 bp, Homo sapiens
  misc_feature (1)..(530): N=A,T,C, or G
gacactgagtctaggaatangcacatatggagctaaagacctatgctttaaatactctaaatatatagactacacaaaaacatatgggaaaaatgtactgatgctaagataatattgttgatatcatattgtagaaactataactttaaaccaatagttgtgagcataaatgttacagtgatattgtgtgtaatatatagtacatgtaaaaatgaaactaaatttatatataattgtatatatgacatcaacaatgtaattgatattcttgctgttatcacaacactcgaaattaatgaatgctacagacatggattaaaaagactangctctctaaagagataaagaatattacttaaagcacatattattatgtgtaatacactattagaagattagatctaaactatacaacacanaacgtacttcttttcatcatcctctgctacaaactattgccctcctcaaaatatagacgattgctaaaagagtctgagcgatgatgccatcaatgaacaaacgttttgagt

SEQ ID NO: 8149 - DNA, 514 bp, Homo sapiens
  misc_feature (1)..(514): N = A, T, C, or G
tgtcttggagtaaattttaagttcatggatgtaatgtggtctacaggaatactgtatttgtaaaaaaataagaacattctgcaactgtagaaatgaccccattatatattttctgaaaatgaaaacagttacatgaaaaaaatgaccaatgaacatgtcatcatttgatgaaaaaccagaagttattagatgagagcagcgagtgaatctttaaaacagacttgatcacgcacactcaataagtaatatctctccgaaaccggatgtcattctatatctgttagaaataatgtcatcaaaagaaagtaaattagaggatatttttgccaatagtttatacaaaatatatgaaccaaagagattggaatttgtaaaaatgtaaaatagtatgaacaatatttgcactctaccatatttgaacatctnnatgagttcacattcatactaggttatcaacattgcgttctttttgcattcattctttactgttattaaaagttcaaaaccaatataa

SEQ ID NO: 8150 - DNA, 170 bp, Homo sapiens
  misc_feature (1)..(170): N = A, T, C or G
ccactattatgggatttgttttagtccattatggattctggatattcaancatttacaatgtagcatatttgattttcttttttctttctttttttggcatcattaacatttcatttgaaatgcatattgttcttgaagtacctcggccgcgaccacgctaatcactagt

SEQ ID NO: 8151 - DNA, 162 bp, Homo sapiens
aggcgacagggaatggcaagtttctgaagtcggcatagcttagttgttgcatccagcagagagacagcacagggagcagcctacgcaggaagattacaacagaggaataacacagaatacaatctgggatggataatagtgaatggcatccactagatgatt

SEQ ID NO: 8152 - DNA, 498 bp, Homo sapiens
cagtctttttttttttttttttttttttttttttgggtttggaacctttaataaaaataaaaaaggaatgcaaaaagaacacaatgttgaaaacttaatatgaatgtgaacctcactagatgttcaaatctgggagagtgcaaattttggtcatactattttacatttttacaaactcaaatcactttggttcatatattttctataaactattggcaaaaaaatcctcaaatttacattcttttggctacattatttctaacagatatagatttacttccgggttcggagagaaagacttattgtgtgtgcgtgaacaagtctggtttaaagattcactcgctgctttcatctaataacttctggtttttcataaaatggtgacatcttcattggaaatttttttcatgttactggtttcattttcagaaaaattataagggggggattccaaaggtcagaaagatcctatttttttaaaaaaaaaaaattctggta

SEQ ID NO: 8153 - DNA, 194 bp, Homo sapiens
actattaagttctttcacaaaataatcatcttatatcaacacagtaccaatctaagtgtccgcaggagggttactttaacatctccctcctgtgtttactccaatgtttctccctttaggtatggtctgggtaaatcggtttatggatgcatctgtccacaccacgctcgcagcatgtcactctgcgcattaag

SEQ ID NO: 8154 - DNA, 178 bp, Homo sapiens
gtgcgctggctatggacacgtaaaggaattgccacatggtggacattgattgcaaattgttgaggggatggaaaggatgttggacgttctggtgaaaagctggaagatggccctaaattcttgaagtactggtgaagctgtcattgtcgatttgggtggtggatagcttctgtacgtg

SEQ ID NO: 8155 - DNA, 450 bp, Homo sapiens
caactattatactattctcttctgctttcattctgatgtggtctgtaatagcaaaatacatgacttatttgtgtggatggcaaaacaaaaggtgtgtgttggatggtctgcttatcagtggatgatacaacagtcaagcaaaacctcgcggccctaacccaaaatcgatgaatctttggaacttgaaagacaatctggcctgtatgaatgggcaaacagcgaccatcattcgaaatgaaactggtaggcagtcacatttgacattcatgatcttcactggctactcgtccagactcaaaacgctggtgactgttaacagtgtcaggttttaaccaagcggaattccattaaatatttgccccaatgctctggaaactgggagagaatctttgcactgtgatagctgctacactgtgcgcctgaacacagcgccattggtggtaccccccg

SEQ ID NO: 8156 - DNA, 178 bp, Homo sapiens
tatcatatacataaaacagatggctggggaggaaggaagacaaacaagaatgactcagctggatggacatacacttaatgcatgatcaatcatcaatctgtctgttatacattagttggtgagtgggatgtccatacattaactattgaatgaaaggtaagttatttaatatatttat

SEQ ID NO: 8157 - DNA, 226 bp, Homo sapiens
ttttttttttttttttttggttttgaacctttaataaaagtaaaaaatgaatgcaaaaagaacacaatgttgaaaacttaatatgaatgtgaacctcactagatgttcaaatctgggagagtgcaaattttgttcatactattttacattttttacaaactcaaatcactttggttcatatattttctattaactattggcaaaaaaatcctcaaactctcattcc

SEQ ID NO: 8158 - DNA, 530 bp, Homo sapiens
tactgactatggaaacatgaatatatgtaagggccattcatgatatatgaatgagaagagtaagctttcatatggaaaaacacaatcattcaaaaaatgaatgacatgctgatgtatagcaacacgcatcataaaatgaagagtatatcaataacatatctatgcttagataagtactaccttctgtgtattatagaacaataagtgtgcattggttgtactttgcaactaacgcatgggtatcatgggtatgcacccatcatgatggagtctggattaccatcttgcttttggataaaacagatctatttggggcatctacataggattaatagagagagaaagaggatatatgattcataaatcatatatgctctgatcaaatgcaagcatcattaaaaaacatatgctatctataactactcatcagattgctgtgatctatacactctctccacatattaatactgtgaaacttcaactatagcacattactctggatatgcaaagttagcacggtaggacatgaa

SEQ ID NO: 8159 - DNA, 578 bp, Homo sapiens
agcatttaatccaaacaggggttcttagcctcagcactatgacattttgggctgactacttatttgttaggcgggagctctcctgtgcattgtaggataattagcagtatccctggtggctacccaatagacgccagtagcaccccgaattgacaacccaaactctccagacatcaccaactgtcccctgcgaggagaaatcactcctgggggagaaccactgacccaaatgaattctaaaccaatcaaatgtctgggaagccctccaagaaaaaaaaatagaaaaagcacttgaagaatattcccaatattcccggtcagcagtatcaaggctgacttgtgttcatgtggagtcattataaattctataaatcaattattccccttcggtcttaaaaatatatttactcataaacatttgtgttttgttgaaaagatggagtttacaaagataccattcttgagtcatggatttctctggtcacagaatggtgtggcatttggaaacgggaataaacaaaattgctgcatcaatgcactgagtgaaggaagagagacagaggatgaagggttttaga

SEQ ID NO: 8160 - DNA, 530 bp, Homo sapiens
ggtgaggtagtatgtgagtgaaataaatggatggaattagtgatatgaataattgaagtttgagaagtagaatggatgggcgtgttgtgattattagtaaaataagatagaagaatgttgtaagaattatatggatggatatgatatgtaggttattattgtaatttatacttttatgaattgtgaataaggaaatatattctatatagattaggagtgaaagaatcaggtttataaagtgaaataattaaatagaatgcagaaatgaagagaaagggatattgtgtaacatattattggaagaataattaaaatatttaatatgtgttataaaagtgaagataaaagtgtatttttatgaacagaattgttatgaaatattatttttacattaaattaaaagtgtattgagtgaatatgttaaggaatatttattggaaatattagagttaggtacaattgaagaaatgtgtgaatgaagaagaggaagtgattactgggtgaaattatagtgaattggaaataattga

SEQ ID NO: 8161 - DNA, 693 bp, Homo sapiens
gcggtggttgtgatcggctatgtgggtagcttggtggtgtggtggcggcagtgaggggctaggatgggtggtaggatatctaggactgagacggagacttgacctccacgatgcaacatccaatgagtatgctatgtgagaaaaatgagagattaacgagctaaatgcagtgtgtatgatgtgtgagaacatcacagatggatgatcgcacaagaggcatttgcatgatatgatcgcttcatagatggaataatcgaactggtgaatatgtatgagctgtgatgaatgttgctgcagaatccatctgttgaaccatgtatatgcaatgtgtgaggaggctagatgaatggatcatatcatgatgatgttaacaatgttgggtgagattgctatggtgacaaatcatgtggatgtatacaggaatatttctggttgctgcggttgacaaccatgggggatcagacaagagaagtagtagagagtgatgttgacatcgatgggggatacgcttataaatgatgaagtggatgacgtgtgcatgtggagcgtatacgatagttactaacgagtttggagcatagtgtgagtattatatattgtcaagttaataacgtggtggatgcattgttatagttgtttattgtgtgaaattgatatctggttataattatggtcataatttgtatcctgtaa

SEQ ID NO: 8162 - DNA, 194 bp, Homo sapiens
atgatagttgtgaaatgattgattggagggtaagttattggttgtttttagatttaggttagaaagaggaggtatgtggataggagtaaataatgtgattggtttattgggtgaaatattatgttttgttgtttggatatatggaggatggtgattttagtttggataatagaggttatataaatgcaatggaa

SEQ ID NO: 8163 - DNA, 466 bp, Homo sapiens
cagcatttaatccaaacaggggttcttagtctcagcactatgacattttgggctgactacttatttgttaggcgggagctctcctgtgcattgtaggataattagcagtatccctggtggctacccaatagacgccagtagcaccccgaattgacaacccaaactctccagacatcaccaactgtcccctgcgaggagaaatcactcctgggggagaaccactgacccaaatgaattctaaaccaatcaaatgtctgggaagccctccaagaaaaaaaatagaaaagcacttgaagaatattcccaatattcccggtcagcagtatcaaggctgacttgtgttcatgtggagtcattataaattctataaatcaattattccccttcggtcttaaaaatatatttcctcataaacatttgaagtttgttgaaaagatggaggttacaaagataccattcttgaagc

SEQ ID NO: 8164 - DNA, 672 bp, Homo sapiens
cccttaagattctggacctcttagaaggaaggctcatctatacacttcaaggacatacgggacctgtctttactgtttcattttcaaaaggtggagagctatttgcatcaggaggtgcagacacacaggtcttattatggaggactaactttgatgaattgcattgtaaaggtcttaccaaaagaaatctcaaaagattacattttgattcaccaccacatcttcttgatatctacccaagaacaccacatccccatgaggaaaaagttgagactgtagaaattaatccaaagcttgaggtaatcgatttgcagatctctactccccctgttatggatatcctttcttttgattctaccacaacaacagaaaccagtggtaggactctgccagacaagggtgaagaggcctgtggatatttcttgaacccttccttaatgtcaccagaatgtttgccaacaaccacgaaaaagaaaacagaagacatgagtgacctcccctgtgaaagtcaaaggagcatacctctcgctgtgactgatgctttagagcatattatggaacaactcaatgttttgacacagactgtttcaatcttggagcagcgactgactttgacagaagataagctgaaagactgccttgaaaatcagcaaaagcttttagtgctgtcca

SEQ ID NO: 8165 - DNA, 514 bp, Homo sapiens
  misc_feature (1)..(514): N = A, T, C, or G
ggcttgggctgctggggcaggggcaactggaggcaagcggaaaacgacgattagttctttatgtatgataataaattaatattaatacatatanatatatagatattatgtaaatgttactatgataatggttatcgtttatacgttatcgtaatatcataagatttttatacaaaatcaaaatacgaagactactaacatgaggatggagaaggaaaaaagtttctgaatcttgaccgtggctgaggcggagacgattcttggacttggagctgtatctgtatgtaaatgaacatagaggaatacgactacagaacctaataccaataccaggacaatggctctgcatttaaatgatagtgactgtgactgaatacagtttaagttaattgttgtaggtgattgtgattatattaatgcgatagcgtatattgagatgaagatctaagtgattgtgaacacttgaccttgatgtccctggacacagtgcattagcgtcatttctaggtcacgc

SEQ ID NO: 8166 - DNA, 402 bp, Homo sapiens
  misc_feature (1)..(402): N= A, C, G, or T
ggtactgtgaaaccaccaacttcagttgcctcagactccagtaatacaacggtcaccaccatgaaacctacagcggcatctaatacaacaacaccagggatggtctcaacaaatatgacttctaccaccttaaagtctacacccaaaacaacaagtgtttcacagaacacatctcagatatcaacatccacaatgaccgtaacccacaatagttcagtgacatctgctgcttcatcagtaacaatcacaacaactatgcattctgaagcaaagaaaggatcaaaatttgatactgngagctttgttggtggtattgtattaacgctgggagttttatctattctttacattggatgcaaaaagtattactcagaagaagcattcgtatcgaaccataaatga

SEQ ID NO: 8167 - DNA, 322 bp, Homo sapiens
  misc_feature (1)..(322): N= A, T, C, or G
ttctcccttaaggactttggcaagaataacaagttcattggaatttgactttctgacatagagcagacagccttgccctgtcatgccaggcctttcatgtgaagttaccatttattagctgcttctgtctctccnagggaagatttcccttttataagcctgggccagggggatgatagtaagattccccatgtgataccagagttggaataagctgtagtgagattanggccaggactgtcccattttgattcttgaatggtttctgttacaacttgtcatgggggaaaaagtaacacttattttttttttcctcccttaa

SEQ ID NO: 8168 - DNA, 290 bp, Homo sapiens
tactatgatatgtgaatggaaaagtaggcagctgatgactcaaattaagaattttaattacattgactccaagtctgatattctgatgagtgtcatatagcacttaatgtctgcttcatataatactaccacttattagatatatatagactcaagagcattaacaaaagtagagaaagagtgagtcattatatacctatgagtaaaatatgaaaatgactatatgtgtctgtctgtgtcttgttatcggtgatgcaaatagttaattcttgatggaagctgtcgacgtg

SEQ ID NO: 8169 - DNA, 242 bp, Homo sapiens
  misc_feature (1)..(242): N = A, T, C, or G
cggtggtncatcgcttgntggtgtggttcttatnattaacnccattgtgtatacaggtttccagtcccttggggtacagtagtggttggccagatggttatgtaagtatttggagtcaggtgtataatggattttcgggtgatatggatgtaaagaaaagctttccttgttcacccggacttgaaatcgtggagttttaatagcagatcttcagcaggtgagagaatcacagctgcattcca

SEQ ID NO: 8170 - DNA, 178 bp, Homo sapiens
ctgtcgagaatggaggattcttacgtggacatgagttgcattgttctttgatgctgtaggcttattaaaagtatgtagtgactagtttccaggcacttggaatctgtgttcctatggttggcggcatagcagctagcatttttgatcaccatacagcagggcttcgggtagtcgcgat

SEQ ID NO: 8171 - DNA, 242 bp, Homo sapiens
  misc_feature (1)..(242): N = A, T, C, or G
ccagnaggttatccctgtacctgccctggtgattggccagcgaatcaggtctaaccagcacaactcccacctggaccagccgaaccagctctgagcatgagttgggtcagatctgaaacatcccctgcataaccccagcaagctacctcccctgctaattatggatgctcatctcctgcaagcatcaaccgcattggcagaagcagcaaacccacttcctccttgcttagcatggaccatgg

SEQ ID NO: 8172 - DNA, 722 bp, Homo sapiens
  misc_feature (1)..(722): n = A, T, C or G
gggaccgggaggtgacttagtgctgatactggcaattggnaaagatgagggacgnctgcttgcactccagcatgcggccatttttaattacattgtttcccaagtatgcatattctgnacatgtctatagcacttagtgtctgcttcatataaactaccagttattatatatttatgatgcaagtagttttccaaatgtggtgaaagtctgagtctttttatccccatgggtaaaatctgaatctggctctctgtgtctctctgtgcttgtttattgctggtcagagagtcaattcttgataaaagctgttgacttggctctcacagtttatgcagacattggagagacgatctggttatttcaaacatcacaggatctgagtaagaagacctggttatgaaacaaggctctcataattactagctatgactgttgacaagttaccttttcttgtttacaagttatttggcctctttgaattacttgtaaaatagagatagggattctttcttgatcatggaacatcaaatgaagttatttgatgaaatactttgttatctggaaattataaatatcacttcatgtttattattatttggaatttgggcttctcatggtggcattttctatggtcatttttttcttttcttgcataatggctataaagttagttagacatgcaaacaaatgccctaagtgggaaattttgaataggttaggg

SEQ ID NO: 8173 - DNA, 242 bp, Homo sapiens
ttgtttgcagagtcctcaaatgtatcacagaaaacagttgctgtggaaacttatagtggaccctactgacgcacaagcattaagaagtccacttgctgcatactgtaaggagaacttgctgcatttgggaaatgctgcttaaggcaacacacattacctttgtgacagggctctgtccactggggtgggctgatgcaatctatacagaatgcacatgctgcctttttttcttctttttttgc

SEQ ID NO: 8174 - DNA, 194 bp, Homo sapiens
  misc_feature (1)..(194): n = A, T, C or G
agcacgtaacccatccgatcccccaagattaaggaaaaagagtgggagagcaaatggaagaagcccctgctaacgggatgctaatgagaaatggggagcaggaggctgacaatgaggtagacgaagaagaggaagaaggtggggaggaagaggaggaggaagaagaaggngaaggtgaggggggggggggcggg

SEQ ID NO: 8175 - DNA, 354 bp, Homo sapiens
tttttttttttttttttttttttttgggcttcccaattattttaatgaagggattgggaggaggacatacaaaacggccagatacacagggtagcaggggcttgataatgagataattttcccccacgtgttgggaaaaaaaatactatgtatttttttatgaacactattaaaaaaaaataaacccactcacaacattttggagggactaaaggccaagagaaaccaatggagaatcattatttgggggatgggggggggagtttctggggggcagggggggatgtggacaggcaggggggggtggaggaaccttgcctctggcgggaatgggaaggagggacaaggaacaaa

SEQ ID NO: 8176 - DNA, 603 bp, Homo sapiens
ccccaaataactttcttattgctctgaaagaagaaaagcaatgtaaatcactatgattattgcacaaacaaccagaattctccaacaattttaagtaatctgatcctcttcttggagaaaattgttacctaatagtttttccttatgaatgttattactactggtataaatcaaatttctataaatttcctacttaagtcttaagaactgggttcttcctttgatgttattcatgttcagaaaggaaacaacactttactcttttaggacaattcctagaatctatagtagtatcaggatatattttgctttaaaatatattttggttattttgaatacagacattggctccaaattttcatctttgcacaatagtatgacttttcactagaacttctcaacatttgggaactttgcaaatatgagcatcatatgtgttaaggctgtatcatttaatgctatgagatacattgttttctccctatgccaaacaggtgaacaaacgtagttgttttttactgatactaaatgttggctacctgtgattttatagtatgcacatgtcagaaaaaggcaagacaaatggcctcttggtccccgccg

SEQ ID NO: 8177 - DNA, 354 bp, Homo sapiens
ttattttatttatttggtattatgtttttttattttttttttttttgttatttttttttttttttgttttttttttttttttttttttttgttttttttttttttttttttgtttttgggggggggaataggagagggggggggaggggggggtgatgaagggggggggaaaagaggatttataatataaaaaaagggggaattaaagggggggagagaagttaatgaaaaggaggaaaaaaaaggatatattaataaaaaaaaattggaaaaaagggggagttttttattaagaggggggtatattttggggggaaaaaaatatggggggggggaaaaaaataatagtttggg

SEQ ID NO: 8178 - DNA, 352 bp, Homo sapiens
acggattgaattgactgatgcatgctcacatatgtctaaaaacaatctgtctgcaataacatgtcatgaatgtgtgactgactggtctgtccttgtgcgagctactacctgctgcctgctatcaatctctctaacaacgggtggacacacacccaccgactgctggttgtcttacacagagaggaaggatccttgcaactatctgggagattaatatgtaaccagcaacctgtgtttgcagccagctgtgggaggtcaaacaaacaaaagcatgcaagcatgtgcggactgaaccgagtgatgcgtgcgagagtacctgcctgggcggacggtcgcactctcttactattga

SEQ ID NO: 8179 - DNA, 464 bp, Homo sapiens
gctttttttttttttttttttttttttttttttttttttttttaaaaaactaaggaaattaattgggttcagggaaaaaaccggaaaaaatggtggaaaaaagtggtaaaaaaaggttaacttaaaaaatacaaaaaataccttggggtaaaattttggaaggggggggtatttaaaaaaaacggaaaaaaaaccaaaacctaaaatattgggaaaacaaaatattaacttttttttttttttaataaaggggggggattgtttttggaataaattaaccaaaaaaataaaggtacccctggtttttttaagggaaaattttttattttaatcaaaccctaaaaaaaccttggtaaggttttatcccattttaaggggggaaaaaaagggctaaaagggggaagggaaaatccttggtgggcaaaacggattatgggggcaaggtaattgaaatggaccccaaa

SEQ ID NO: 8180 - DNA, 448 bp, Homo sapiens
tacagttaccattgtacaatttatgaacacatggattaccttatgacaaagcattatatacaccactgtactagatgatgaagtgctaaccactcacatcactagcatgccttctatttatccaaatatttaaaggtgatatttattgtcgaatgggtggggtggtaccaatggtctctagtatggttagtgtgaaaactataaatatggatctttcagtgagctattagtgagcacctaggggctataagatggtttcacttattaatcacaaaatattcattattatggtgaatgttagatatactctctatgtaaattggttagtaaaacgagttagaagatatgatgaatacaaaaaaaataaaaacagacatgcatgggcggtggaggccatgatcttaaggaaaaaaatgttgtgtgagtcgtgtataacattaaatgaatc

SEQ ID NO: 8181 - DNA, 576 bp, Homo sapiens
caagtaaggggttgtacggtgctgcgaggtcgaatagcataccaatattggttgatctgtctgcaacattagaaatatggagatatatactatttatacatatttaacattaaatatatggggaatatatctttagactcatgaaaaagaataatgtattattatatgcatcatttgtgatatgatatatgactgtgacatgaatatatgaattatttgtaatctgtataaccagtgactgctctgcgaatatcactggtttatcgactgggccagctaggctatgagactacgcaggatcatatggggggcgcgctatgcaaccagccgaaacaagaaccactggagaagtgaggtgatactactcgatgactcgacgaacagctatatgtgaggcgatagtatccagtgcactgacggcttgacaatatgcacgcgaatgtgtccagtgctccaagggcatgacataacataaccagaaagtgtcaggcgggcgcgtagaaaacatgccgacaaatgagactgcacgcgtgcggcttcaaaaattgctgacaactgtgaccgctacctgccggt

SEQ ID NO: 8182 - DNA, 160 bp, Homo sapiens
gacaggggggggggggggggcggggggggggggggggggggggggggggggacgggcagaggggacctattggatgcaaaaaagaatatctatataaaaaaaatatagttgtttttttgtggtttagaaccaccagtaacaatgaaaaagtattcaataa

SEQ ID NO: 8183 - DNA, 208 bp, Homo sapiens
cagttgtcaacaatatttggtaagcaaccagacatgtaaatcttctgtagatgctttgtttttcattatggtgcacctgtacacatttcaagttctgttctgacatgtccattattatcactgtgctctttattgtcaagcatatttttttttaccggtctgtaaactgggatagttatcactttctctttttttatttgtttatttg

SEQ ID NO: 8184 - DNA, 160 bp, Homo sapiens
gaagtcttgtgttttactaatgggaaaaaaaaatacagaaaaaagttttgttactcatggctgccccaccgccagcctgggccctaaaaacagcccagcgcctcacttctggcttgggagaaatatttctttgctccttttgggaattcatggcttgatg

SEQ ID NO: 8185 - DNA, 160 bp, Homo sapiens
gaggtcctgcaaaccatctcaagaccaaaataagcgacccggcctatgtccccctgttattgggattgacccacacggcctctacattggcatgcctagttttgcttgcatctggaaagaaaaagaattgaatcgcacgtttctgggtaaaaaagctggg

SEQ ID NO: 8186 - DNA, 528 bp, Homo sapiens
tttttttttttttttttttttttttttttttttttttttaaaattaaaaaggaattattttttttattgccgggttttattaaagggggattttaaattaattcattggagggggtaaaggaaatggagtgggtgggtgggaaaaggcaggggggccaaaaattattacccattaaaattaaaagtggtttgggtgattggtggggttctggtgggttgggttgggtttttgtttttttgggggtgggttttctggtctttgttcttgaccacttttttaaccattggggttgggggataagaaaaaatttttaggcaaggttgggtattaaaaccacaaaaattttggggggaggaaaattaaatttattgttttaaaggagctttcggggagggggggggtttggtttttgttaccgggaggtgggggggtaggggggttaacacgggtctttttattggaaatttaattctcttaaactttcaaaatggttggcgggggaaaaaaaaaatggccgggagggccag

SEQ ID NO: 8187 - DNA, 384 bp, Homo sapiens
ttttttttttttttttttttttttttttttttttttttttttttttttttttttttttttttttttttttttttttttttttttttttttgggggggcaaaaaatttttttttttttttttggggttggaaaaattttttaagggaatttttggggggggaattttggggataagttttaaaaaaaaaaaaaaaagggggggtaatttttgggaatatttaaggaattaaacaaggtttttatattaattttaggggggggtttaaaaatttatttgggttttaaaaaagggtaccattaaaaaaaattgggattggcttttttagggggacttaaagaatttaagggggtttggggggggggaagggggttatataggggagg

SEQ ID NO: 8188 - DNA, 222 bp, Homo sapiens
cttttttttttttttttttttttttttttttttttttttttttttttttttttttttatggggaaatttacctttttttatttttttttaatattgaaaattttaaaaaaggaattatttttcatttggggtcccggccgggggggggggtaggatcacttgagtaatcaggggggcggtggatggggcgctgaggggagaacacaaacacagggcaggggg

SEQ ID NO: 8189 - DNA, 352 bp, Homo sapiens
tcttggtctaatatagggtatgtgtaatgaactgctagactgtatgcggtacatgaactatactagtgatggggtgctggctgcatattgtgtattactaggtctagttctatgtattaatatgctgcattgtggatatggggcaatatattttttggacgcatctctcttattagtatgatttatagtcctctttcgtgtaatgcaataatgaatatctattattagatggtattatttcttatgacctatatcctgtgactgtctctcttactcctttgtccgcggactgattaggcatggctatgtgtttacgtggctttatttctggggccatcctggcagtgcccct

SEQ ID NO: 8190 - DNA, 160 bp, Homo sapiens
agcttttttttttttttatttttttttttaatgtttgggtgtaaatttattaaaagatttgatttataatatttgtaatggtgactgtcaccttttttcctgccttgctactgatgggattattctgcttaatatattttttattagatgtgcaagttaa

SEQ ID NO: 8191 - DNA, 160 bp, Homo sapiens
tactgacatgcatgtactaactagggtctatggcatgacttgcataggctattacatgctgagttggtagcattagactgcatggtatcataataattgaacacaatgctgatgaagaatattatctcgtggtagttagtatatttataggcaagtggga

SEQ ID NO: 8192 - DNA, 480 bp, Homo sapiens
tacaagctttttttttttttttttttttttttttacaagctttttttttttttttttttttttttttttttttttttttttttaaaatatttttatttttattattttggtattaattaaaaatatgaaaaaaaaagtaaaaggggttcctttttggggggaggccaccttgatggcttaaaacaagcttaataaatcgaaaaaaaaaatgggatgccaaaagatggggggggaaaaagggcttgggggttaaaaggcgaaaaagttgggttagggggttgggggggggtaacagagggaaaaaaaaattcagtttaggggaccctaaggggacgggggggggggggggggtgagggacacttggaagggtttttggagggggattggggggggagggtttttgttattgggggagatccgggagggaggggcggggcagggtgggggtccagtggggtaaattttcttaagggcataaa

SEQ ID NO: 8193 - DNA, 240 bp, Homo sapiens
tagagcttttttttttttttttttttttttttttttttaataggttaaaaaaaaatttttattttttttaaggggtgttaaaaattggaataaagaatatgtataatatttgttagtggggggggtttggtgtaatgattgaatatataggaggatgaaagatatttggttgtaaatagataaaattgggagggaaggtggaggggaaagggggaattttaaaaagatatattaaaaaat

SEQ ID NO: 8194 - DNA, 224 bp, Homo sapiens
tattacatggcacgaggacccactgagaacacaacgcctgttgcggaacaagaacacggaatggggctaacaacagactaagtactttattgttaggcggataatatataactcatttggacaggcctgggccatatctctgactatgccctatattggatgcctggcaggggcccaagcccaagaggattctttaccctcggaacagctccccaggcactcag

SEQ ID NO: 8195 - DNA, 192 bp, Homo sapiens
ctaagattgataatttgtgtatgtgatataaacgttttattaccagatgtgtacatttaatgagctatcatttacattataaaggttgtgtgattctttgtattttttaaacacaatttttatattcaaatctgttggagcaatgaaaagatggagagcataaacaggtttttctatgctgatagaccatgg

SEQ ID NO: 8196 - DNA, 288 bp, Homo sapiens
tgatgaaagccaaattgacgcaggatatgaacctgttttgtattgtgataaggttaatattgtgtgcaattttggtgaaatgagagaaaagattgatcgtggttttggttgaaagatggatgatggtgcttgattgttggatgatggggatgatgacattgatgatatggctggtggaaagctgatgtgtggtgatagattcttaaactatggagatgctggtattgttgatgtgggtgatgtgaaacagatgagtgttgagagtgtcataaaatatagaggattaga

SEQ ID NO: 8197 - DNA, 304 bp, Homo sapiens
tttgatttttttgaaatatgttgatatgataatttatgatataatttggaggatagttggttatttttaattttataattacaaaaatattgtaaaaatttgtgtttagtatacatttttaatagttgtatgaaaggtgtatatgaatattataatgaaacatgttagtaagtgtaattaagaatgatatgaatatattttgtgttaatgatataaagaaatatgggattgatatttaaatgaaaatgtttgtattaaggataataatgataaatgttttaaattaatttactttaaaaaatta

SEQ ID NO: 8198 - DNA, 240 bp, Homo sapiens
tcgtgctaatggtggttctgaatgcaatatttgaatattaaatttaaatctatatattattatggaacataatttatatggggaatatattataagactcataactgaaataagtatgtataataaaaagaatatgtgtaatgataatgaatatctattaatatatagtatcagttataagttttatattatgtgagtgtcttaattaattattggttgtctgagtgatttaggcgacgt

SEQ ID NO: 8199 - DNA, 224 bp, Homo sapiens
agttgtatttaaaaaagcataagtatagattgtgttgggtagaaggagaggagaatgagttgatttgttgaagaggagggtgtttgtggatgaagaggagtaagagttgaaagtagaaagttgaatagatagggaagtgttgtgagtaaggaaaagtaaggaaaaggattcattataagagaaaatgttactgagtgaattaataatatgtaagtttggtttca

SEQ ID NO: 8200 - DNA, 704 bp, Homo sapiens
caagctttttttttttttttttttttttttttttggttttgaacctttaataaaagtaaaaaatgaatgcaaaaagaacacaatgttgaaaacttagtatgaatgtgaacctcactagatgttcaaatctggtagagtgcaaattttgttcatactattttacatttttacaaactcaaatcactttggttcatatattttctataaactattggcaaaaaaatcctcaaatttacattcttttggctacattatttctaacagatatagatttacttccggtttcggagagaaagacttattgtgtgtgcgtgatcaagtctgttttaaagattcactcgctgctttcatctaataacttctggtttttcataaaatgctgacatcttcattggaaatttttttcatgtaactgttttcattttcagaaaatatataagggggtcattcccaagttcagaatgatcctatttttttaaaaaacaaaattcctgtaaaacaaattaactccaggaacttaaaatttactccaagacatttccctcaaaacaaagcaaaaaacccagccaagatcgttacatcacaaaaccaaacacaaagaacagcgctcacaggcaagttcctctaagctttcattctgctgactggtggcttccattttaaaggagtctttttatccagccactttcacagaattttataac

SEQ ID NO: 8201 - DNA, 576 bp, Homo sapiens
atgagtgaagataaaatgaccagcagaggaatgcatgtctggtttcagagttgcaggttattatcctgaaccatacatgaacatcataagcgtgagtgtgatgaactgtatcggatagctacaaagcgcacattagaatgcgagtttgatgagttgaaaggaaaaatagattgccggtctgggtagtagttggaagatggttctaaattcttgaattctggtgatgatgactatgttgatatggttatttgggagatattgtgtgttaagagtttatcaaattattcttctttaggtcgatttgcgggtcatgatattaaatatatagtagtagatggtgtaatcataagtagcggaatacagtgatggtggaactggatacgttcgcaactctgctcataaagctcagatagctgaatgaatagtatcacttataggtgcccactaagtcttaatcattggtgagataacaggcgtagaattgtttgtttcatttgggattctatgtatagttataaatgaatggataatgatcacaatgtgtcgtataagcattatagcgagaagagagatgtc

SEQ ID NO: 8202 - DNA, 368 bp, Homo sapiens
ctcatgcaagtgataggtggaactgtcgcctgcagctaaaacagggaagcggaataagatgctgatgctgtgtcgaggtcgatgagcatcctggtagtggtggctgtgcctgcaatatttgaattttaaatctaaatctttttatttatatttaacattattgatatggggaatatatttttatacttatcattaatatatatatttataatttctgcttttgggtaatgaatatgtatatctatttatatttgttttatttattatttctatttactgtgactgtctcacttttttctttggtttctgtctgattagggttgggtatgtgatggcttagttttatggtcagggccgaattggcaggc

SEQ ID NO: 8203 - DNA, 672 bp, Homo sapiens
tttttttttttttttttttttttttttggttttgaacctttaataaaagtaaaaaatgaatggaaaaagaacacaatggtgaaaacttaatatgaatgcgaaccttacttgatggtcaaatctggtagagtgcaaattttggtcatactattttacatttttacaaactcaaatcactttgggtcatatattttctataaactattggcaaaaaaatcctcaaatttacattcttttgggtacattatttctaacagatatagatttacttccgggttcggagagaaagacttattgggtgtgcgtgatcaagtctggtttaaagattcactcgctggtttcatctaataacttctggtttttcataaaatggtgacatcttcattggaaatttttttcatggaactggtttcattttcagaaaatatataaggggggcattccaaagatcagaatgatcctatttttttaaaaaacaaaattcctgtaaaacaaattaactccaggaacttaaaatttactccaagacattttcctcaaaacaaagcaaaaaaacccaacaaagatcgctatatcacaaaaccaaacacaaagaccagcgctcacagggaagttcctcttaactttcattctgctgactggggggcttcatttaaaaagggtgttttaatg

SEQ ID NO: 8204 - DNA, 288 bp, Homo sapiens
  misc_feature (1)..(288): n = A, T, C, or G
catgagtccgcncagtgcggtaaaaattgntggaaaatctgacctgtggagtgccttacatatgtacttgaatagaagtggtcaataagattgattgcatactgcattggaaaaagacataaagaatgcttgacctatctatttatcctctctcatgatgtcttcgtntagaaaagttaaatatgctgttataagctcatagtttgcaattgcggatagtctcatgagagcttgatggatgaaggctagtaatctgtggtataagccatctggggaacgaggacagga

SEQ ID NO: 8205 - DNA, 160 bp, Homo sapiens
actgctgaacctttttatgttggttacttgtctatatatgctatcttttggtagtctttgctagcttttgatattgtgactgacaaaggtctgtggagtgtctatgagctccagcgtgacaacactgcctgctggcagcttggccagtgctcactcaaaa

SEQ ID NO: 8206 - DNA, 255 bp, Homo sapiens
  misc_feature (1)..(255): n = A, C, T or G
cagcttttttttttttttttttttttttttttttttttattttttaaaacaagcaaatttttattaaaggaaaaattttgcgagttttaaggtttgcgaggtgtaaattttgtgagggtgaaaaggtttactttttcacncagtctgtttctggcatgtcttttaatggatgtcagaagtccacctggtatcaatgtatatgccagtggtgcacactcttgtagttattttcccgcatgtctgtgcgccagtttt

SEQ ID NO: 8207 - DNA, 192 bp, Homo sapiens
  misc_feature (1)..(192): n = A, C, T, or G
tgttcgtgcggacaagnttgtggcgtacagcaaaaagcacccaccaaggcaagacagctgacttcatctgctcatntgtattatcctgcaaccatcctagtgcaaataaagcgccggactatgacctgctggtattgggattgagcacacgtgtctcacattgatatgtcaagtgttgactgaggctgagag

SEQ ID NO: 8208 - DNA, 224 bp, Homo sapiens
ttcccctttttttttttttttttttttttttttagggttttattttaaatgggaagggaaaaattaaaagttaagggaacattaaagtggaaaaaaaaagggaaacacttaaccccaacttttttgaaaaagaaaaaatgatgggggggggagaaaaggtaaggggggaaaaagggtatggggggattggggggggggggacgtgggaggaaaggggagggagg

SEQ ID NO: 8209 - DNA, 752 bp, Homo sapiens
ttatgaggtagatccttgcttgaaagtatctgctgaaaagcccagtaacgtggcagcttcatgcataaagatataaatgacatttgccttaaatttggcagcctaccctggcttgggtcagattttgttgttgaacacaagaaagtatttaagcaaagaaacacttcagtttaattgaaaacaactttttgtaatgctgacgtgttaaattggcctgagggtattaattgatatctgttgattttgtttttctttgaagtataacattactttttggagggaatttttgaaagatgctttcgatttctctcaattctttaagtcatgcaaaatgaatttaaaatccagggagtatggatgcattgccttagttttgatgagctttaaattaaatgtgtgcaatatcaaaatattcaaacttacaagctgggtaaatacatttcctgattaatatcttagtgcttaattgttcccacattttcaaatttgactttactcttttttggcgtaattcagtaagattgttaccagccagtgtgtttgcacacatttgggttgtgtctagatgagttagggacagtcataaaagctggggatatgtcgcatttgcaatcagtagtagcatatttccagaatatgagccataaggtgcagtcctgaatacaacagtgttatccatagaaaggagctttctgacaaatatacatagccttactaatgagtacccctgcgccctccctcccaccgcacct

SEQ ID NO: 8210 - DNA, 368 bp, Homo sapiens
ttttttttttttttttttttttttttggttatttctatttttttttgtctttttgtataggctaatttgtcggatttggggatgagatattgaagggttgaaaggattatatactgtattggtggttggttggttggttgttgggctgggggaaggggggggaggtgggaaattaattaataaaatagtaataaggtcttagataaatattatagttaaagggaggaggggggggggtagggggataaaggggcaattgtgaaggggggatgggtggatgtttttgtggagctgtgggagtgaggatgttaaaatgatttatttttataggtaggagggtgggggggtggtgggtgttacgtggcggg

SEQ ID NO: 8211 - DNA, 690 bp, Homo sapiens
atgtggtgtgtggtggacacaaagttcatttttattttctttttcctttattttttcttatggtgaatgatggaagattaccgattaattacacatggcacatggataatggatgttggctgtcatattcaattgcaatttgttatagtgctgtgtgattaagtattgtttattgactattatttattctatatggtatataagaaggaagcaggaatgttagctgatgacacgtgaatatttattatacatgctgtgtgctgcgtccatgttgattgcttatgacgtatggcgtatggaacatttttaagtcattcttgatggtagctgatacctgatctgtgtgttgagttatcctgtatgtggatcatattttaaactggattacgtgttactggtttgggtgtgggttgtgaaccacaccagagatcactaaacttgcttcaggtttagtatctgactggtgtatggattcttaagcgccataagtcatttgagtatttgattatctgaataataacatgcaaattagcaagaactgggcatacagggtaagcggcaaggacaataaggatttttgtagatattatatattttttgtttttggttaaggagacaagtttgaagagcagacaaaatctcttttttaatatagtatgaatgagaatacttaaaaaaatttaaaaaata

SEQ ID NO: 8212 - DNA, 370 bp, Homo sapiens
ggtacatttttatttttttttggttgatgttgtttgtctttgaatgaagcatgtaatttattctcttaaagaggagaatacatgtggatctttagaaagtaggaggacatgtctaacatagatcgcttgtgtatattttagtctataactgatcatgcattacttagctgggcgtggtggctcatgcatgtattctgaccttctggggcaactgacgctggataatatttaatacctggatagtggatgatgcagtgagccacaatcacgccaatgcactccaacctgcgtgacagaccgagactatgtgtaaacatctacttcaaatatatgggcctggatgaatttaaatccgtggatggcgacgtac

SEQ ID NO: 8213 - DNA, 162 bp, Homo sapiens
tactcttccaattaatatctacattgatattcaccagatattgtgaactgataacactgaaataataagaattgcatagtatttgaagctgcatatcaataacagctttcttggtaatggctcctaatctatcttctttatggtgtggtctgcctcatattc

SEQ ID NO: 8214 - DNA, 178 bp, Homo sapiens
gatagggaaaagttagattattggaagattgtgtatacttattgatgaatatgatattaaaaatggggatgtagataaagaagaattgtgatttgaatgagaatattgagaatggattattgtattgagcttttagtgtttttttatttaataatggaaaataagctgttgtttagag

SEQ ID NO: 8215 - DNA, 498 bp, Homo sapiens
gtaccattttgcagcggagggcatgatggaaggacaagcgtttagaaagtatgtatctactctgtgatcggatattggtatgtaaggagtgctgctgtaactggaaccataagagggattatgcttacacaatgatctcatggatatgtgttgttagcatgagctgtggatgtaggattgtgtgctagaggaacgggtggagagattcttcaagctatggtgaatgatagagataatatatctgtatggcagaatatggacggcagaaagtatttctatatgacaatgattatttgctatgtatagatggtgacattattgcaatgaagctaggacgtgagcacgctaatcactaatgaatacgggattggctgcagcttgaccgtatgagataggtcccaacgtggcggatgcatagattgagtatttgtatgtgttatatagatagctaggtgtaatgatggatataggtgatagtgggtgaatatgttattcgct

SEQ ID NO: 8216 - DNA, 550 bp, Homo sapiens
  misc_feature (1)..(550): n = A, C, T, or G
caacgctctgaacgttccactccacaataggagacaccagctgaagatgcgagatattgctgggcaggccctggcttttgttcaggatcttgtgacggctcttctaaactttcatacctacacagaacagaggattcaaatttttcctgttgattctgccattgacactatatctccattgaatcagaagttctcacaataccttcatgaaaatgcgtcctatgtccgccctcttgaggaaggaatgcttcatttatttgaaagtatcactgaggatactgtgactgtcttggagacaactgtgaaattgaaaactttttcagaacacttaacctcctacatatgttttcttangaagattcttccctatcagttaaaaagtttagaagaagaatgtgaatcctctctttgcacatctgcgttaagagccaggaatctagagctgtcccaagacatgaaaaaaatgacagctgtgtttgagaagctgcagacttacatagctcttcttgccttgccaagtacctcgggcgcgaccacgctaatcactagt

SEQ ID NO: 8217 - DNA, 162 bp, Homo sapiens
  misc_feature (1)..(162): n = A, T, C or G
gctgggcacgtaaggtnacgttggtgaatatctctaactcacggcatngtatatgcaggtattttcggtaccaaggacaaggttctaagtcatactattaaaggctaataaaattcaaaaatggtttaaagaattcgaacattttgaatgacgcagagggct

SEQ ID NO: 8218 - DNA, 530 bp, Homo sapiens
  misc_feature (1)..(530): n = A, T, C or G
ggnccgagtcaagcctgcgtatcagaatctgagacagcgtgttgacaactttgttgcaaatcacttggcaactcacacatggagtccgcatctcaataagaaccagctaagaaacaacattagacaacaagtcctcaaatcangaatgttggagtctggtattgaccgaattatttctcangttgtggacccaaagatcaaccacacattcagacctcaggtagagaaagctgtgcatgagtttttggccacgctaaatcacaaangagaangaagtggcaacacagctcccgatgatgagaaaccaggcacttcccttattacacaaagtgttcctactcctgggcccagtgctaatgtagccaatgatgccatgtcgatattggaaaccataacttctcttaaccaagaagccagtgctgctanggcttcaacagaaacatcaaatgccaagaccagtgagagagcgtcaaaaaaacttacatctcatccaaccactgatactaataaccctgccggcggggggtgga

SEQ ID NO: 8219 - DNA, 242 bp, Homo sapiens
gtccggggatgcacgcatgatggctggtggtggtatgttgaaaggataaaccacagccaaatgaaaacactattgatacaggttatggcgacgctgatataagtaaagacagacagcagggcacatgacacgacatacacacagcatggacggcaagcaggaatacagatctgattactgagatgtgccattattgatgtcaagaaggttcacatgatacagtgtatgagtgaaggtctcat

SEQ ID NO: 8220 - DNA, 290 bp, Homo sapiens
acatgatataagagaaatgttcctatggtatatatgaactcctaacactatgatcgtttttttttttttaaatgtgggtattggtgtgttttattttttgctgtttacttcttaactgaagacttgttgcgttgtaaaactgtttaataaaatatatggcattaacttgtatttacaaaaaaataaaagacaggctttacactatttctagggggacactatttcgggaatgttatgtaaaactctctatctagccattgggaccgatatcagttgattgggtatcgtct

SEQ ID NO: 8221 - DNA, 242 bp, Homo sapiens
aacaactccaggtgcaagtgaacaggaataaaaatgccatcgtttttactaatgaatttcacaaacatatataagcgaaataacaatggcagatgcctccactgtacttgagcaagtcatcactgatctgtttggagaaattagtggtgatgtcggtgctggctgtggcctgtttctgtctgattgtgaaataggtaggcctggttatgtactggtgtgtaactccaggtaacggcatattt

SEQ ID NO: 8222 - DNA, 178 bp, Homo sapiens
gttttatgcttgtgggttttttttttctctgatctaggtattaactaccaaataattcaaaacaccaaagaaatcatttgaatgggagaaggagaaacaggttgaagcactgacaatttttgcaagtgagaattcaaggactgtattgtagccacagttatgtacattatctacgaac

SEQ ID NO: 8223 - DNA, 354 bp, Homo sapiens
cactatattggccaggcttggatatatgaaacttgtgtcacttaaaactaaggcggtgtgtgatattaaaagaggtcttttacatctgtgttagctggcttgagaactcgcaactttgactatcttgaatgtgctgctggatggatggcctttgctctgattaggatccccatggtgaaccctgtgcccacagatggatccggatgcagtgcacttgtcgttaatggagctcgtctgaatgcataggagatgtggttcacacaacagtgcaagaaacctacggcctaggtgaggggaatccacttgcgcacagtgtcctctatctcacacccttgctcgacgactgcacagcat

SEQ ID NO: 8224 - DNA, 450 bp, Homo sapiens
  misc_feature (1)..(450): n = A, T, C, or G
gttccagcactgagggaagactcagtctctgccatcacatacacctcatcactaagaagagacacatgaaataattaccatccagtgtgataagtgctctgacagaggatggagtgaggactagtcaccttggggaagacagagaagcaaggtcccaccaagagatgagaagccagcctccangagtgcgctatctgagagggcaagagaaagaaggcaaaggagacgggtccatacttgaacaacttgaaataacttgtctgcatttcaagaacaacctaccacagaccttacctgtcaccttggctctcccacccaatggagatggctctaatggtggcacaaaccanggaagggaaatctgtggtttaaattctttatgcctcatcctctgagtgctgaaaggctgctgtnagctgtatgctgttaatgctaattgggatagggggt

SEQ ID NO: 8225 - DNA, 178 bp, Homo sapiens
aggggtaggaagtgaggtgtatggatatggaaatgtaatgaggtggtaagtaataggaaatttaaaggggaaggtgaaatgagttaggatgtttgtggatgagaagaatgttatagatatttatgatttgtagtgggaagttattgtattgttatattaattttataatagttatggt

SEQ ID NO: 8226 - DNA, 514 bp, Homo sapiens
ggtggcggagcttgaggtaatggtgaaggggtttgtgtgtctttgagagatagagattaatacatctatttataaaatataatcaattagttaatataatattgattaatgttaagtttgttacgtaatttttgtttattatgattttattagaatatatgaaaacttataagattataatgaagaatgaaaagatttaaggttattacatgatgacgggagttgtgatgagtctttttcatggaatggaagatgtattgaaaagtaatattgagagaaaggactgcagagacaagaattaataccaataggaaggcagtgctttgaaattataatgaatgtgagtgaatgagcttaaagtataattgaagagttgttagtgattaaaataattagaaggcgatcgtttgtgatgagatttaatcgaaagtgattattagaaattgaaaatacgtgaagagtggtgtattgagtttgttaaaacgttaagttaacgcattttagttataagcta

SEQ ID NO: 8227 - DNA, 162 bp, Homo sapiens
ggctcgctggacgcgcaggttactatggtgacttaatgtaattctaatgtactacatttataaattttggctatatgaatgtatcatcaatggaaatcgcatatctgtcaaggatctgctctttgctaatgaaaagtggtagagcaatggaacgagcgcttg

SEQ ID NO: 8228 - DNA, 290 bp, Homo sapiens
caggtaccggagttggatccggctgctagctacacggagtgtagggacactcaaggctcttacatgcgggaaccgagcacatcatcatgctgggtactttctggccacatcggagactctgacaattacttgatgctatgatctgactgaagacatgaagtaagaggtcactgtgactaaatatccagaagcctggaaggaggggccgggagctctcaagaatgggggacaagatggccacatgagggcagctctgtgccatatcggcacaaggcggaagaaagaccaag

SEQ ID NO: 8229 - DNA, 178 bp, Homo sapiens
aggtacataaaaacgctgctgggtagaggtcctgtggtgacagagtcaaaagactgcaatgttgatgtcacccggtgaactcctggtttgtgagagtgcatcgggattcaatatcatggaccttaatggagtaattggaagacctcaataaggaaaccattgagcctatggaaggttt

SEQ ID NO: 8230 - DNA, 370 bp, Homo sapiens
acaatatggttcgttcttttatatcgaaaaaagtgtaacttaaaaaaagtttatttatcgtataaaaataagtcttttacatctgttgttagctggtagtgaaaacttgaaagactcagactcagtggtaaacaggatgaatggtcccacctcgcctttccgtttgggagagggatcttgagggctgggacccctctgcgtcacagtaggttgagtgcgttgctggggcagcaggtttctaaaattttggccttcaaggcaaagccatagcaggggatggggtttcagcacaaccagtggcaagaaaagactaggggccctcggctgatgggaaatccaccttgtgcaccagcggttcctcacaactcaa

SEQ ID NO: 8231 - DNA, 178 bp, Homo sapiens
ttctagggtaaaggaaatatcataaaaactaaatataagcagaagctcaagggatctatgtatgaaagtgctgggagaataaaagttatggaagaggaggaaattctgaatcaaacacagattctttggtttctgggcaggattataagtgtgtatagagtgggaagaagctcatatg

SEQ ID NO: 8232 - DNA, 210 bp, Homo sapiens
  misc_feature (1)..(210): n = A, T, C or G
tatggntcagntcttttatatcgcaaaaaggtgtaacttaacaaaaaggttaatttattcgtattaaaaaaaagntctttttacatcctgntgnttaggctgggtggtgtaaaaacttgnaagcaactcagcacctcagatgggtaaacagnatggaatggttccaccctcgtcttttccttttggcagcaggatcgttgnagggctggc

SEQ ID NO: 8233 - DNA, 194 bp, Homo sapiens
  misc_feature (1)..(194): n = A, T, C or G
atactcgggnggnatggnggnctccatccggncctcgcggtccaccttccatcagatgtggtatcancaagacagnagtaggacgagtccggccccctccatcgtccaccgcaaatgcttctaggcggnacgtatgacttaagttgcgtttacacaccttttcttggacaaaaacctaactttgtcgcagnaat

SEQ ID NO: 8234 - DNA, 242 bp, Homo sapiens
  misc_feature (1)..(242): n = A, T, C or G
tcggagtctgntagcgaggtaaaatacgnacccagtaaaattgtcaatagccagtgtcttgtaattgttttggtttcggnttgttttctattagtacttatggtcagtctccggctgtattgcatacctcctgcatgcgtaggtaattacggtatgtgttttagtggagctgggtactttctaggggattttagtcgggggtgtatgtcctttgttgggggctcagctgctcctccctagtt

SEQ ID NO: 8235 - DNA, 242 bp, Homo sapiens
  misc_feature (1)..(242): n = A, T, C or G
ggtacaagagagtcatggaaagtatttgaacttgaacttaatagcgatattattaatgtgtgtgtggcgcacaatcttggcctcaaaaggtcatggataacctgagcatgctcttattacataactggttagacaatacgaccgttcatatacactgcttgctgtatccacggaaagcacacctgtcgcacaatgctctgaaacagctacttcacgttgtgctggacagctgaagangtgtc

SEQ ID NO: 8236 - DNA, 162 bp, Homo sapiens
agtacaattatatggccccagggatattgcggagggatgggtttaaaaaagtctttcggatataagaaagaacataggatgaaatgagtggtggagaaagggttacctatagaagactaattattcaaatacttcctctatctatagtatagtatattcata

SEQ ID NO: 8237 - DNA, 226 bp, Homo sapiens
gtgtacaggctggacacgatgatggatcacaggcgctggatccacgtgtaagccaggacgctcagaacaggcttggcgagggcgtggatgtgctcgcgatgtacgacaagcaccaggactcagagtgcataatcagcgtgcagacacatcgcacagtgcatgcttccggagtggagtaggactgccacatatgggagatcaaagatggcactgaagtaagcgaaca

SEQ ID NO: 8238 - DNA, 194 bp, Homo sapiens
gagtatttggggaacacatgtctaatgaatgccatccttgagtctctcataatcattgatcagtcatgctgttatctcatgcaactgcccgccgaggtagctaagaatgggttaacagcgagcagggcagacataccatgcctggatccaatgggataacaatgtttatttggcagactaattttactaagata

SEQ ID NO: 8239 - DNA, 258 bp, Homo sapiens
gtataaaaaattggagatgtagggggttgtagttgatgtattattatttgattttatattataatattctatttggtgttatataaattgatggggaggtgttttttaaatatttaaatttaggtttggattgattatgtttatttgtgagttgtgattatttttgagttgtgaagttttgtaatatttagtggtggagatggtgttttggtatgtgaatattagcttgtgtgggataaggtggagaatgtggttgta

SEQ ID NO: 8240 - DNA, 290 bp, Homo sapiens
caacctttttttttttttttttttttttttttttggtttttaaggggggggggccacaatggttaaaaaggaccttgggaaacagggaacgaaaaaaatggttttaacaaaatttgggaaccaaagtaaaatgggataatgggggttgggaagaagggaattggtttggtgggagccggctttgggctcccaattccttttttttgtcctttggctggggttagggaaaggggggaggcaaagggcaaagctccacccctgggtattaaaaaacggcagaacaaacatgt

SEQ ID NO: 8241 - DNA, 290 bp, Homo sapiens
  misc_feature (1)..(290): n = A, C, T or G
acatagattatctgggcgtggtggtctgtgtctgtgtaataccagctacttgtnaagtgtaggtgggatgatcaactgatccaaggaggacaaataggtgacaatgagctgtgatattaacactgaaatgcaaccggagctgcatgtgaacctggttgaatatacataaataaagattgctgcaccattggatgaagataggtgatttcatatatgacttgcggccagatgcagtaggaaacatatatctgtgacacgattctacggagatgactggagggagagtacgt

SEQ ID NO: 8242 - DNA, 162 bp, Homo sapiens
tactgtgttgaacttcattattcaatgtcattctatgtcataataacagaaaaccctatacaatcagagttgctcaatactggaccttcatgcaatactaggaaccgttacgctggtgcattgatacacgcacaccatacgagtcacaatgccaaatggaaa

SEQ ID NO: 8243 - DNA, 210 bp, Homo sapiens
gggaccgcagggtgcactacaacctacgaactacgcgcaccaccaactaccaccagctggtcgaacagacgcaagtatcatcacaagcatggtatacaacactgctcctgcgcacgaacacctctggagggacaccatgctgtatgctgctaggctagtctagtatcctgggatattcaatccacttaatctgagttatttagcaagtcc

SEQ ID NO: 8244 - DNA, 242 bp, Homo sapiens
tactcactatcggtgctggaatcagtttcatagaatgactagctaatagctgcaggtggctataaaagaaaggaatgtgcaacaaaggaaatgaatgatgtatatctacatatgataacactgacagcttgtgtaggtaccatggagaacagccgaataggctgatgtgaagatggtctgtgtagggctaaaatgactaagtaatgtgtattgtcaaggtatgttccaatacagtataacag

SEQ ID NO: 8245 - DNA, 178 bp, Homo sapiens
gtacacaggatatagacaataggaaaataatacctcggtcattaacaacacatatagaaggacaccagctgtatcgtgctggctatcacctacctgtatataattacttatctggtataagctgacaacatagaccttaagtgtaggtgggcaatgatgctaggaatctgtggaaggt

SEQ ID NO: 8246 - DNA, 162 bp, Homo sapiens
gtctggacaattcactgagctcgttctctctctctctctctgtgtgtgtgtgtgtgtgtgtgtgtgtgtgtgtgtgtgtatctggctttatgttgcattctttcccattgggccactgttctgtgccaacatgcaacgcaataatctgttacccacattcag

SEQ ID NO: 8247 - DNA, 306 bp, Homo sapiens
tacatgatggaaaggaagaatggacgacgatgcacgacgctgatgaaggcacagataatgacgaggacgaagtggggggacgaacgagggagatggatggtcactagaatagtatgacccctgtggtgggcgaacgagcgagattgacagacatcacagccgcatgcactctgcagtggcaacagatggaggctcaacagcattaaccacgccaagcctcgggcatgtaccagccggaggtgactcaggtgcataagacagcccacagttgaggcgatgacgtgggggaagagcacaagcgagaaa

SEQ ID NO: 8248 - DNA, 600 bp, Homo sapiens
gccggtaccataaagaaagtaggattaaaatctaaaaagacccccaaagcttttcaaaacctgatctgagaattagataagaatatgtcacttagaaagacaagcctgtagcacccatagctctgattaacctgaaagcatcaagtgactccctctttttccaccctaccaacatcactctaattatacttccaattagaaaaataatgtagcatttccctggcagtagagattaaatatgagttcaggaatcagctcctccaaacatgcataaatgaggacaaggagaagccagtcactcctgactgcacggtcaagtgtgtgggcagttgaaattaaggtaaaaacagtgaggctgaacaaaatcacattaagaaaaagcatctcatgaggcttttcgaggtcagttgatgaaggccagataggagtcaatattttctcatataccccagctgttaccactattcatattccaacagcctccagattgctcgaggccacctggttgacttttaccttggagtcggtccagaaaagcattatttacccttgtgatattgtcctcacagtacctcggccgcgaccacgctaatcactagt

SEQ ID NO: 8249 - DNA, 434 bp, Homo sapiens
caggtaccactatttgttggagatattgcacagtggaaaatgacataatcatggatatgctatggtgtacgctgtatatacagttgaaaactatggagttcgaaatgttgggggagaatgtgatatgagaaaaaagatatacatgtggtaagaacctctaacaaggttaatgtgcatgcgcgaaggctcatgaaagatcagtgtgtaaattggcttatagcttatacaaaaaaaaaaagaaataaaaaaaaaaatgacctcggatcgcgaccgcgctaatcactatgtgaattgacggccgcctgcgcgatccaccatatgggcatagctaccaacgcgcaggatgcatagattgagtattctatagtgtaacctggataggttggcgtaaatgtggtcgtatgctgtggctgagagacaattgtatccactcc

SEQ ID NO: 8250 - DNA, 258 bp, Homo sapiens
ggacgagctccagtatatttcgtagataaggcacagatgaaaatgacatagtcatccattgctatgagtgtaagcagtctgtacaatgaaaactatggatgttaaatgatgaggaaaatgccatgcgagaaagagagacatgtgaaactaacagctgacaaaggtaatgtgcatgaccgaggtgatgggagacttcagggtgtatattaccttctacataatagaaaacaaaagaaaggaaaaaaaacaaatacttgg

SEQ ID NO: 8251 - DNA, 434 bp, Homo sapiens
gcaggtgcaagggcatggtgctgagggggcagggggaggctgaggcagccgaaaacgcattatttttctctttgaatgataaagataaatacaactacatatacaatataaacattaggaaactgagacaaagataatggttaaggttataacgtaatcgtaatagcaaaagattataatagaaaaaaagaatacgaagactagtaacatgaggaaggagaaggaaaagagaaaatgaaacatgaccgtggctgaggtgaagatgattcatggagaaggaaatgtatatgaaagaaaattgagagagaggaatacggagacacgaaccaataccaatacaagggcaatggttttgcattaagatgaaggtgacggagacagataaaggctaagtttaaaagtggaagttgatgaaaataatagtaaggggatgt

SEQ ID NO: 8252 - DNA, 162 bp, Homo sapiens
cgtaggtacggccctccccctgtatgcctcttcgtggcagtaagcatggaatattgtaaatggtaggactccagtaattccttccagtggctctactatcaggctaggctcaggtataacccaggttatggcatattcgtaggtagctgctctctatgtctc

SEQ ID NO: 8253 - DNA, 546 bp, Homo sapiens
  misc_feature (1)..(546): n = A, T, C or G
ggcaggtgaaggacctgtttatctctgatttctggagttcagcnactagaaaccatcaatagatgtctcacaaaacatctggaacaactgaagacccctgtggggactctttcagacatctttggaaacctgcatcttgactcattgccagaggagtcagatgtggccactgattctatcccaagagagatcttggtcacaggaacctgccatttgaagtgtgtgtgttacggcattgggaactttgccacctgcatcgtagctagaaaccagctaacgtttttgctgcttttgttggaaaagtgccagattcccagaagtcactgttgggtatatgaccctctgtttagccaacttgaaattgaagtccttaacacccttggtgtgactgttctcagtgagaacgaggaagggaaacggagtattcgcggggagccctaccatcttttacatgctccattgtgggacggccttgtacctcgggcgcgaccacgcctatcactagggaattcccgggggcctggcggtcggaccatttggggagag

SEQ ID NO: 8254 - DNA, 530 bp, Homo sapiens
  misc_feature (1)..(530): n = A, T, C or G
ccngggtgtaacatgccataccatgacccataacaggggccatgcacacccatcagtgaggaccttcggcctagccatgggacttcagtctaactatgtgacgctactcatactaggtatagtaactaacacaatgactatataccaatgaagacacgatgtaacactgaagagcagatgccaaaggcacaagacaacaccagtgcaaaaaggcaccagatgcgggataatgctatcgattacgtgagatgttatttatttcgcaagatgtttctgagtctgttagcactccatgatagtctctacactccaaccaagagggcactggccaactacgagggtaacggcgctcaacacgctagaagccgcactactaaacacatgcgcaacacttgcataaagaggatcaaccagcagagcgaaccatagtcaaatgagaaaaacacgaaaccatacaatacaagcgctgcttaacacaataagaccgggtcattacaataccactgtgcatgcatcatagcctcccgaca

SEQ ID NO: 8255 - DNA, 274 bp, Homo sapiens
cgggcaggtactcaccgtgcgtgacactcaagcctgacttaacacagtgcatgtcatctgatctacaagaagatacagaactggaaatgaaaagacatgtggcggactatcgggcaatggtggaattgcataacgaacctgtctagtgagtctagcgtgatgctccataatgatgcacacttggtgcatcatagaggtgtaagcaggaaccaagaaccagccagcagtgtctacactttgtgattggacacttgggccggggaacacgcctcta

SEQ ID NO: 8256 - DNA, 418 bp, Homo sapiens
agcccccccccccccccaccccggccccccaaaccaccaaatgaagggcacgggaggaggacacacaacacgcccagacacacagcacagcaggggccgcgaaacggagacaaccccccccccacggccccgagaagaaaaacaccacgcccccccccacgaacaccaccaaaaaaaaacaaaccccccacaacaccccccgggacccacagcccaagagaacccaccggagaaccaacaaccggggggaggcggaggcaggccccggggagcagggaggaaagcggacagccaggggaggccgcgacacccccgcccccgccgggaaaggcaggcggcggcaagcagcaacaaggggacagaagggggggcaggagcggccgggagccccccagcaaaaccaaccacaaattccggg

SEQ ID NO: 8257 - DNA, 450 bp, Homo sapiens
ggtaatatgatgaataataaagatgatgcaaacacagaacatacttagtcagacatagatgagtacagatagatgttgaggtggctggggagtcctgagtggggatgttggagaatgggaatacgaaacagcatgctctaataatggacacactgggagagatgcaactaagggttacagactgcaagatgagacaacaatgagccagcgtacacacaaaagatataagaggaacacgctacagaaatcaagcaataagatgaaaaagatagggtacaaaccacacacattaacaaaagtggctacaactgggaggaatggagacaagaggctgtatctgggtgctaaggtgacaagatgcaaggagagggaagtcacatgcaatgatggaaaggacagagagaccacgctgatggtggctatggactgggtaccaccatgatcgtagct

SEQ ID NO: 8258 - DNA, 162 bp, Homo sapiens
ggggacaggatacggaggagaactcaatagcatggtcactggtgtaaattctgcattgtagatacacgaagcagcctttacctattactggagcctgccttcactaacaataaatgaaaaagctgctatgcacttctacagcaggctctgggattgtcatat

SEQ ID NO: 8259 - DNA, 178 bp, Homo sapiens
gtaccattggtggccaattgatttgttggtaagggagggatcgttgaacttatttgatatggaccggtagcgtagggctggggacggggacgaggagcacgatgtaggtagggacgatacatcataccgcttctatttgctgcacgactgaccatgatagtactagccaagtgatggt

SEQ ID NO: 8260 - DNA, 594 bp, Homo sapiens
aggtacacctaagttcacatgaagttgtttcttcccaggtcctaaagagcaagcctaactcaagccattggcacacaggcattagacagaaagctggaagttgaaatggtaagtgaaactgtatccaagtaagcaggtaactgggcaaacttcctacggcacaaatggctttttagttacctcctagtgctgaatgcattaaataaatggcggattcttgtcttgttatgattaataagaaagtttgtaaatgcagcctggatgatgataagcaaatgctgactgaacatgaaggtcttaattagctctaactgactaaaggcatttgttagttttggcaggggatgaacactcatctgtggctattctaagaccactcttatttcttatgtggagtccaacttgcctggaccagcttaatggttctggtaagttttaatgaaaacagtagatagacttaatgaaaatgctgatggtgatatgcttactgctgagctaatggcttaaagcttggctgatgaatactgactgtattttccttgagcatgtgtggaacagcggttatgtgttctccttgaccgtggttgggacggg

SEQ ID NO: 8261 - DNA, 674 bp, Homo sapiens
gtaccttgagaggtgtcgttaactttccttgttaacgaaaacagtatatcacattttcttgctgattaaagttattaattcagagactgaaggggctggacttgctacctgtatagaactgtgtgtaaaggctcttcgcttggagtctacagaaaatactgaagtgaaaatatctatttgcatgaccattttatgtttgttgcctgatgatctggaagtgtaaacgtgcttgtcaactgagtgaatatattattgagtctacagtagatgcgtattatgctgtggaaatgttgtataatcagacagaccagatatatgatgaagagaatcttcctataccaaattctttacgctgtgagctgttacttgtattgaaaactcattggccctttgatctagaattctgggattggaaaatcttgaaacgacaatgtcttgcattaatgggagaagtagcatacattgtgtcttcaataggatgaactaaatgacagtgaggatatgaaaaagtggtagactaccaagaagagagtaaagaaacttctatgaatgggctttctggtggagtggtgctaattttggccttcttaaggacttggtgatgaaaagacaaaaaaagagaaagataaaacaagtaaaaaaaaaagggattaatatgtgcttggattatgtat

SEQ ID NO: 8262 - DNA, 324 bp, Homo sapiens
ggtgaccatgtgagatgtggattaccatgagcaaaacacgacgaatgaggacacctctgaaatatatacaaagcaacatactgatgattgtgataacgtgccgtaaatgtaactgatctctctgtcaccaatgacgacagaggaggcatataacacaaatggcaaataagggtctaggactggaggatccagatgagactgaatgaatgctataaataatcggtggctaccacgcatatgaatagagaatcttcgtgcgattagctggttaacaatattggataaccttcatacgcataggaaggatatgtagtaaattatatt

SEQ ID NO: 8263 - DNA, 194 bp, Homo sapiens
aagcttggtatttagttttttttttttttttgtgggtttagagtggctcaggggggcgttaaggtgtgccagactgtacgcgcatagttcagaaaaaaggggcttgaatttcatgtgcaacttgggatggggggaaagggggacgtttgagaaggagggaaaacagggggggaatatttttcaaatcaaccttc

SEQ ID NO: 8264 - DNA, 194 bp, Homo sapiens
attggggcaatctcaaaagtagtaaaattttttttgtcttttggcttaactctacagtcacagcagaccaagtttcagcttacatttaataggcagaaggggagaaaaaaaattgacaggaatgaaagtgcgtaagaacatcacccttagaaatcaattacaaggtacttacatggaagtagaaaaccatctct

SEQ ID NO: 8265 - DNA, 226 bp, Homo sapiens
ataggccgggcctggaggcgcatgcctgtggtgccacctgcttaggatgctgaggccagataaatgattgagcctgtgaggcggaggatggggatacattgttgattagctagatgagcttgaaaatatagagataaacaagatcctagagtgcatgaagttggcatgagaaatggaatttgtttggtggatgaatctgaaacataatgttagtgacagtaaaaag

SEQ ID NO: 8266 - DNA, 162 bp, Homo sapiens
aatctatgactgcatacagttactaatacaaatattaattacaccacactttggaagtataaaaatggtaaggtaatggtgtgtaattgagaggatgagatgagaggatagtttaggccgtgtcttgctgcttacatgaaagaagacttgtaacaatgaatt

SEQ ID NO: 8267 - DNA, 418 bp, Homo sapiens
tgatcagaacacatcagattagctacagtgttgggattatgggtgtgatctattgctgacggattgtgatattgtttgtgtcattatttggtcactttgatatcgtagattattattgtgttgtgttaatatagtataatatgtgtattcaatcacaaattaaaagacaatatagttgttatcatcaacagggaatgatgaggaaggagtgtaaggagagatcagagactgcaagagaataagtgcagagaagccagcagagataattatatatgtattatataagtatcagtgtatgtcgtggttttcatattgctaggtagattcataaaattgagatctctgtgatactatagggtatatatgttcaacttgatatgaaactgtgatgtgttttccacagcggatgatacggccc

SEQ ID NO: 8268 - DNA, 434 bp, Homo sapiens
cgggtatattcatagttaagtgataggtacaattaaaaattcatggcatgtgattaaatatctatcgacacatgctctgtttattatgtaattctgatatcttgaactaggatgtggatgtggattgtggtctgataggtatctattggatactactaccaggttgagttgttcatgattgacatggaaaactaccaattgttataacatataataatcatctatacttacatatgggatggttcattagggtcgacaggtgtgtgcagtgtcccatgttagtaatctgacttaatgtgaaatttatgacccccccttggtgctcctatgtggttagtggatctattatattttctttctgtttggcttttctcttttttctgtgttataaccgttgtgcggtctggagaatagtgactattttgtgtctgttt

SEQ ID NO: 8269 - DNA, 306 bp, Homo sapiens
ggtctaattctctcttttggaatgtagattttttttttaccatgctttacgatgtaaaatatttatgttttattgattcctggatatctggctgagggattatacatggaacaggaagatgcgtggtgactattcttgtcggtgatgttgagagtctctcgtgactgtcatattgtagtggtagatcatatattcactctggtaggccgtgacttttaggcttagttcagactgtgtgggcggcgctctagatgacttgtgtctgcgcgtctgtctggaggacagcactatgggatagatcctaat

SEQ ID NO: 8270 - DNA, 290 bp, Homo sapiens
tgtatattctagaagctgataattccagttctggcgaactaggaagattagagcaagattctcaatcagcgtatgatcttcggagaggtgtgggaatgtgttatataacattcatctttcggtgtgctcttggactaatcaacttatcttccataagatgtggttatgggttctgtattagtggtggaggtgggatgagacgcacttaatcatgatgaggattaatttagatattgggtgtgatagtgtcttgagaattgttaagcactattatgtaatagctatttgat

SEQ ID NO: 8271 - DNA, 178 bp, Homo sapiens
gaggctgtcaatggtgttagagaaatgagggctccctaaaacaatttctttatgtatatgttagtcaaaagttatcatgctgtgactatagttatagcgatgaagatgaagaaaaggcagatgctttgatcagtttactcatacaggaagggatagacataagtgacctcttcatgcc

SEQ ID NO: 8272 - DNA, 194 bp, Homo sapiens
cggagggataagaaggtaagtaagataatgtaaaataaaaataagtgatcaaaaaacatgtaaaaaaacaaatatatttagagaacataagttatgttcttgttgtggtggtggaggtggggagttggtgaggtggtttcatcgtcaaacgaaacagcacgaaataataaagaagaaaatacaccaaaaaacaa

SEQ ID NO: 8273 - DNA, 258 bp, Homo sapiens
ttgatcgagaagatgagaatgtggcttgtgatttacaaagaatattaggcttatagtctcagtaacataatgatcatttgaaaggtatatgaatgtgttggataacagtttacatttgagtgtgcttctctataacatgattgatctaccctaatattatgattatgtatataaggattgggacatgtggatcaggtgtccggtattgatggtgacgatgatatgtgattatgggtgtgagagtgaatattgaaatgg

SEQ ID NO: 8274 - DNA, 498 bp, Homo sapiens
aggtactaggaaaaggcctggctgccatccatcgctgcctctgagggtggagaaggaggcgggtgatgtgctcacttctgatcaacatgtgttgcctcctctcagccaacttctagctcactgcactcactctggtcatgataaatgttcgtcacctttctgcttcattccttagggcctaaatcaggaagctgttttatcgatggtttccttttgggtcagtaaccagctttggataatttcctctgattattcaagtcgtgggacaggtaaactacattcagcaggaacttttctcgaggagtgttatgtcatggaaaagacaccaaacacagcaagtattttaatgaatacaccatcccaggggggtcagtaagctctgcctggcaagaagacacagtgagaggggtccacagttcctgatgagggtgggtgtgggtacttgtagaccctaacatgggcaggtctgggtcacctttagaaactctcagagaaact

SEQ ID NO: 8275 - DNA, 258 bp, Homo sapiens
ggtacatataatacagtctgtcaagagaactactggttaaccaggaaaacttggcatgattctcagcgatattgtgttctactgaaaggtacaggaatgcatcagataaaatataaagtgtgatgtgctcttgcgacagcgtcacgcatgtgccctaagatttagttgcttggatccgaaaagagggcggtgtggcattaggctcctgtaggcagtatgaggatgatatcaaatcatgggtgtgaaccttggctgctg

SEQ ID NO: 8276 - DNA, 242 bp, Homo sapiens
gccgccccgcggccagggtacaatgacacctttggggaaggaaaagaaagactaccgttctcaccccctgaccatttggtattagcctggctgccctcaaaaacttcccacgctcccctcccctgcgccaccctcctaaagatgacctggatactacggtgcctgcccccaccccagttagcctccccctactccctgggcctacggagcgcgcacagggcgcatgtacctcctaagaaatt

SEQ ID NO: 8277 - DNA, 162 bp, Homo sapiens
  misc_feature (1)..(162): n = A, T, C or G
tatattaatatntgaatgtcgttgtgattcttatggtactgtgatatatgctatagaaagatggattggagggtttgaataggttatggtatagtcaggagagatagaaatggtgtatgggaaatggtcgtggtatgatatgatatgttattctgatcttca

SEQ ID NO: 8278 - DNA, 402 bp, Homo sapiens
  misc_feature (1)..(402): n = A, T, C or G
atcatgaaatatactctatccctcttctgcttaatatagatctgatctcatactgacttagaatacaatgatatatgtagtgtgtgagtcgtgcagtggcaaggtcaggaatgatagtgatataggatatagtcttgtcgtggtgacgggatattgagtttctattatctaacttagtgtcacaatcttgaagaagtgaatagtttgaatcagaccagttatcattcttgatggaggaaaagggatgatganggtgggtgaacagcatctcctttgctgcctctctgcctccactatcctgtccccatgaggagcggaagaaccgttatgactgatgagtggttcactgcatccctttctcctggcgtggtcttggctctagctgcactctttaggggcaga

SEQ ID NO: 8279 - DNA, 274 bp, Homo sapiens
tgtattgaagtaccaaatctattgatgtttggtgctgataaagaatgtagactgtagagactagcagtaattacttgttctacttaatgatgtcctatgttttattctacatgcaaaaagaatgattgatcttcgagcattgttaaatgttgtgggcggtaattattgtggacagatgattcttgattttgagtctatacagatgtgcattattgctgtggaaaggcacgaggcagctgtgtagctcttataaataaggatcaaatattagctt

SEQ ID NO: 8280 - DNA, 194 bp, Homo sapiens
gtgatgaagttaaaattattgagtgggtgcagaataagagtgtatacagtagagaatagaagtaataatatggtctacttaatgatgtcctatgtaatattcgacaggcaaaaagaatgattgatcaccgagggatgataaatgttgtgggcggtaattatagtggacatatgattcttgaattagagttatgg

SEQ ID NO: 8281 - DNA, 178 bp, Homo sapiens
tttggatgtaggacaactcatttgagaatggtatgatgaatggattgaatctactgggtgataaatatgcatacaagtgaccagctacttggcgtcaattcaaaatactattgataatataacaaatcccaagatggcatggtacagaaaagtggatgatgtgcatacttaatgttca

SEQ ID NO: 8282 - DNA, 162 bp, Homo sapiens
cacagcagagggcaagcggacacgacgaagagacaaaagacacaaaacaagaaacacgaaaccaaaaacaacggccaaacgcaacacaacacaccaacacaacaacacacacacacacaaaaacaacacaacgcaacaaacaaacaaacacaggacacaggc

SEQ ID NO: 8283 - DNA, 242 bp, Homo sapiens
gcaacacgagccccatacacacagcaccggggcaaagcgcagagccggacgggcaccgggcgaccccgcgccccgccgcagcaaaaacaaccaaacacgggcaaaaggagaccctaacaagccgagaagcaaaacgtcatcacacgccaccccctgcgcaaacccgccgggaggagcacaacaagaagcacccagacgccccagccaaccccccagagccccgtaacaaacgcccagagagg

SEQ ID NO: 8284 - DNA, 530 bp, Homo sapiens
  misc_feature (1)..(530): n = A, C, T or G
gggcaggtacaagtgtgcagagctgggccttcattccacaggacataatgcatggacaatataatgttctacagaaagatcatgccaagaccagtgatccangaagatcatggaaaataatgcacatcagtgnaacaagagaacccatagagcttaaatgtgtgtctgtgacaggattcactgcactgtttacttgggaagtggaaaggatgggctataccattaccctctgggatttggagacccagggcatgcagtgttcttcccttggcacaaagtgtattcctgtagacagtagtggagaccagcagctgtgctttgttttgacagagaatggactctctctgattttgtttggtttgactcaagaagagtttttaaacagactcatgatccatggaagtgccagcactgtggacactctttgtcatctcaatggctggggaaggtgctcaattgccatacatgcactataggccgggatagaaaatcgtcagctggacacaggaaatttctttttggagagcaag

SEQ ID NO: 8285 - DNA, 306 bp, Homo sapiens
acaccaaaaagtaaacatgcaaagagggccgaacaacagtcataatgataaggtctgagaacaaaatcaggagaggatagtgctaaatggctgacaggatattagccatacgacattaactacatctggtgaggaggctacatgactggagaggcagcaaacaactggaagccaaagaacacctcaatgcatgactcagaggggatagcagcagaatatactgcaccctcggatccgaactaacatcaaggatataggcctaaagaggatggagcttctaagatgttatgaactggtacgagagca

SEQ ID NO: 8286 - DNA, 194 bp, Homo sapiens
tgagaaggcgccgggcccgggactaggcgtgagccggggagggtacactggggcgcagctctgcggcactcgtctggtggtaataaataaactaaaccatgggtcacaaggtacgatccctaatgaagctccgagtaggacaaaaatgctcgatgatgatgtcacttccttctgttgccagaactttgcgtcgt

SEQ ID NO: 8287 - DNA, 178 bp, Homo sapiens
cagttgcagtagtataaatccgaccgtgcctggcccagcaggacccccaggtggacctgttgaccaaaacaccagcatctggggccgtgtagtacaggtaccctgtctgaacgatagttccaaaaaactgcaagtaagtatggtgggatatagaccccaccccactaacacagtgttt

SEQ ID NO: 8288 - DNA, 194 bp, Homo sapiens
tgtggtggctgtataggcaagttctagcagccttcttttccgacaggtccctttccaataccaaccgctggttgctcacctgcattaaccacccccacgtgcggtctgtcttgggggaagtggaaatgggtggagatgatggcctgagtgttggatggtgagaaaaggtttgtcgaggaggacgcgtaggcgta

SEQ ID NO: 8289 - DNA, 210 bp, Homo sapiens
agcttttgttttttttttttttttttttgggaagggatgatgtgattttttcttttataacatgatttttaaagacattatgcatgggggtaacattcccttgaaagggggcttgcaagggttatgagcctctagccgagctggaatctggaggaagaggcagagaagcttggggaaaaagaggcaggggaggagggggggggcataagg

SEQ ID NO: 8290 - DNA, 162 bp, Homo sapiens
tgggtgataagggtagatgtattattattgtttttgattttgatgttgtgttttttaatgatttgattatagggaaatattatgtaaaataagtgtggataacaagtattgaatagggaaggggatggggattgtgggggagagagtgagttgatagtgagt

SEQ ID NO: 8291 - DNA, 162 bp, Homo sapiens
gttgtgagggttgggtggtgttatttgtaaaaggggtgaaggtgaatttagaatggacttatttgttgttgtgtttaggaggttaaaataatataaatgaaagagtggaagaatagtaaaagtaagggggaaggagggataagggattgtggtttggtttgt

SEQ ID NO: 8292 - DNA, 514 bp, Homo sapiens
accgtttttttttttctagagtcagtaaatataagcttgagttgaaagactttacttattcctgctgctacaatttaattctctaataataatattatattcagagtatggcttattaagtacagggcccacatattgaaccaagttcatgcagatttggattgaagttaatactaacccaattacaggttgactataacttgactcttaaatttgatattatcttcaaaattataaatagattacagagatttagaactggttataatttagtaagattaactttgcagtgttagaatttttagcaacaaatttttagaatttttttagcaaaaagaggaaatacacattaacaataaaatatgctagactggctctgttggctgaacagagcatcatgtggttaaagaactgtagaaacgggcttaccaagggttgaattctacccactgctctccggtgatgtagctgtgttatcctctctgctgtattctcgggttctcttagggtcatt

SEQ ID NO: 8293 - DNA, 210 bp, Homo sapiens
gggagcgcagggagctgacgtctttccgttacaaccctgagttctactctggcattggggactgtgaggtacacatactcaggtccagggatggaggggtggtcagggacgctataggtgaccttctggttgtatatacgggtgtgtgcttaacagccaaagtttacctgagtccgttttcttggggtgatgaacagatgctgtcttgcc

SEQ ID NO: 8294 - DNA, 242 bp, Homo sapiens
tctggagtcggcaggatagcgggaacagccactgggctttggggaaaggactcgattagtagatcgagagtattcgtttctatgcattatcaccagcgcggcatgcatatgttctaggggcagatcattttatatatctgagttatttaggttgattcattgcaggggtctagttacatggaatgagggtagacatgagttctgtaattacatgagagtaggtaatggggctttcttcagag

SEQ ID NO: 8295 - DNA, 258 bp, Homo sapiens
gagtgagcatacattaggatagggatggatgctagtctaagtattgtcgatgtgcttactactacctcctgtgatcgtaaaggtgattgatatataggagtggtcttgctatgtacgtgtatgagacagagtggatggtgaggttaagaagatggacctgttgcgcgccgttttgcacatggtatagatagatggtgatgagtgcagaataatctgatgcttatgtgaatgagtacgagctggatttgtacagccggt

SEQ ID NO: 8296 - DNA, 354 bp, Homo sapiens
ggcgcaaggcagcactggtggtgccggcattcgagaccctgcgctaccgtttcagcttcccacaattgaaggtggagctgttggcgttgctggatgctggcactctctacaccttcaggtaccacgagtggtcccgaggcctcgcatcttacagactatgcccgctggcgggaggctcaggtcccgtaccgtgtgcaatgggcggcccgctatgaactctacgtggtggtgccacgagactgtccccgctatgatcctcgctttgtgggcttcggctggaacaaagtggcccacattgtggagctggatgcccaaagaatatgagctcgtggtgctgcccgagggcctccgcat

SEQ ID NO: 8297 - DNA, 162 bp, Homo sapiens
  misc_feature (1)..(162): n = A, T, C or G
aaaanaagtaccacctgagtcagtgagggccacagattggtattaatgagatacgaaggttgttggtgggtgggtgtgtgctggagctaagtggataagaatgtagtgggagtggaggtaagaatgggtgggggtaaaggaagggggatgggagggcggggg

SEQ ID NO: 8298 - DNA, 354 bp, Homo sapiens
tcaaatgtagagtagagagggaagggaaggagaaggtgggaagtgaaaaaagaagatgaaaggaggatatagagcagaaaaaagaaaagatgagtatttgtgaaaggggaggaaaaaaagaaaaaaagattgaaaaggaagaggatttattgtatagaagtaattgaatgaggaaaatggtgtgtttgtttgatttagatttgtatattttagtaaattatagttggggttagagaatttgtatgatataggatgaacaaaaaagggttagagagagttatatgtcataattctgaatttaattgtggtgtggagatgttaattaattatataaaggagaaaataagttgttaa

SEQ ID NO: 8299 - DNA, 194 bp, Homo sapiens
tcagtgtatgacccgtgaggtgcctgagcgtatttgacgcgtttctgatgattctgcgggaacagtggtgcatgtgccgctagaccggcgagctcggcgacttgagtgatgacgacttggacgtggtgtccaacgacaaagagaagtgtaagacgttagccggacacgtctgagccaggagggaggtggggttg

SEQ ID NO: 8300 - DNA, 226 bp, Homo sapiens
tctggttactatgtgacctcagggagaagttagtaagatattgtgcatacacgttattagatgggcgtacaagtgcatacaagtgataaaagaagggtgagaagagatgtctgaatccagaatcgaaggcgatcaagaattactgaaagcagttgagcgaggagaggtaggtttgatgtagccggcagaagaatcgctatttaggaaacggcaaactgggagtcgg

SEQ ID NO: 8301 - DNA, 533 bp, Homo sapiens
  misc_feature (1)..(533): n = A, T, C or G
tacactacaccagccgccagctctgccccacagacaagaccatggagtttggccgagacttccggatcaagcactatgcaggggacgtcacgtactccgtggaaggcttcatcgacaagaacagagatttcctcttccaggacttcaagcggctgctgtacaacagcacggaccccactctacgggccatgtggccggacgggcagcaggacatcacagaggtgaccaagcgccccctgacggctggcacactcttcaagaactccatggtggccctggtggagaaccttgcctccaangagcccttctacgtccgctgcatcaagcccaatgaggacaaggtagctgggaagctggatgagaaccactgtcgccaccaggtcgcatacctggggctgctggagaatgtgagggtccgcagggctggcttcgcttcccgccagccctactctcgattcctgctcaggtacaagatgacctgtgaatacacatggcccaaccacctgctgggcttcgacaaggcaggcgtgagc

SEQ ID NO: 8302 - DNA, 594 bp, Homo sapiens
tcaggtgggcgtcccctcttcccttgcccttctctgcacggtaactccgtccctcggcatttctcaataccccttgcccctagatccaagcctgtctcttgaggaacaaccgcgcagaccctgcctcttctgaccacacgacccgccttcagccacttggtctggtctcagacccctcagagcaggaagtgaatgaattgtgtcagtcggtgcaggagcatgtggagctgctgggctgtggggctgggccccagggtgaagccgctgtgcgccaggccgaggatgccatccaaaatgccaacttctctctcagcattctccccattctatatgaagctggaagctccccaagccatcactggcagcttgggcagaagctggaggggcttctgagacaggtgggcgaggtctggcgccaggacatccaggacttcactcagggcaaactggacacagcaaggagcctctggccacagatgctgcagggattcaggtggagggaggagatagagggggtctggcagggtgggaggggctcccggagctggtcccagagcaggggtgggagatgccttgtgttagctcagggagatg

SEQ ID NO: 8303 - DNA, 178 bp, Homo sapiens
aggaggaaggtggtcggtgtgtagcaagatagtagagagaactatgtcctgatcctctgataggaaatgtgaagacgggatgttttgatgggtcccagggagctactgcttggtacaggccccaggaggagggccaaactctggacctcatttctgcagtgactaatctggatgtacg

SEQ ID NO: 8304 - DNA, 178 bp, Homo sapiens
gggtgacatgtcagatctttgtacgtaattaaaaatattgtggcaggaaaaaaaaaaaaaaaaaaaaaaaaaaaaaaaaaaaaaaaaaaaaaaaaaaaaaagaaaaagaaaaataagtaagggggccggagggttattccctttagggagggtgaatgtttagtttggaggtgggcgg

SEQ ID NO: 8305 - DNA, 642 bp, Homo sapiens
agtttcttctaaggcatcaagagccccaggctgaaaagcaccccagagctggagcttatagaacccagggcagcaggttctccaaccttctgacatcatcagagcacagcagacaagttatcagccactagatttttttccccctttctgaaactgtaacctttcattccagccattccccagagctggacagaggacgtggctggctggctggtttctgtagtcagaatgacagttgggtgatagatctccttcgtgaagcaatgtcttagctcagtaactctgcagagaagctggctggttcaggatgtggcttatgtaagaagatggccctggcgttttacgcgcactggtgggtgaggctctgaaagtggtagaagggaattctttcctagagttcagctgcccgctgtcctgctcctcaggggaaatgctgtgagatctgcatttagcctgtgtgtgctgattgtggttctgccgcttcctggctgtgtgagctcagacaagtcacccaccccctctggggcagtttcctcatctggagaaggggagagtgccccacacattgggctggttgtgtccatggagtggctgacaataaccagcacacacgagacatcagtagcaggtgggttcttcccc

SEQ ID NO: 8306 - DNA, 546 bp, Homo sapiens
cgttcttctaaggcatcaagagccccgaggctgaaaagcacgccagaggtggagcttatagaaccgagggcagcaggttctccaaccttctgacatcatcagagcacagcagacaagttatcagccactagatttttttccccctttctgaaactgtaacctttcattccagccattccccagagctggacagaggacgtggctggctggctggtttctgtagtcagaatgacagttgggtgatagatccccttcgtgaagcaatgtcttagctcagtaactctgcagagaagctgcgtggttcaggatgtggcttaagtaagaagatgggcctggcgttttacgcgcactggtgggtgaggctctgaaagtggtagaagggaattcttttctatagttcagctggccgctgtcctgcgcctcagggcaaatgctgtgagatctgttttttagctgtctgtgctgattgtggtgctgccccttcctggctgtgtgtactccgacaagtcaccccacccctctggggcgggtttcctcatctggaag

SEQ ID NO: 8307 - DNA, 370 bp, Homo sapiens
atgctcgattgtgtaccatgtactggagaaaaagcatcaagttcttaaaccatgtagcttcgtaccttagtacgcatcctctatctgtggaggctcaaccaattattagccagcagacagtatatgcattgaaaatggcctaatgtcatataactgatgggggtggaaacaggatggccgaggaagctgtgagggtggatagagctggcttatcattctgtgctgtcttcatctgtccataccgcttccaggttgcatcactctcacagcgtgtgagtgacagtatcaggatggttgccggagtctcatgcgttgtgtttatgtataaagggtgcagagagattcactgaaacagatactaaaggataac

SEQ ID NO: 8308 - DNA, 450 bp, Homo sapiens
gagtgagactccggtggcaggaacaaaaacaaagaaaaacgacaccaaaaaatataaaaacacatcagcttgacattttggaggcattcccagactcagggttagtcagcagattagcatttaagaagaaagtcttgtccctacagattgcctgacctcagctacccatgaagggtgggaagaggagtgctgaggaagaagtacaggaaggggacaacctcctcagacctgataggacactcctgtctccaccctgcctcctgactgatttactctcgggggtgtgaggacctctgagataggcgccaggagtctcacgcgcggcactgatgtctcaagggtgacccgagagtcgctgaaacagatactagaggaggggcaggtgataggataaagtgagaggtactgagacttgctggcgtgggtgagcggctccgggggggccgaacg

SEQ ID NO: 8309 - DNA, 642 bp, Homo sapiens
gccgccactggtcgaactccattgtcggggggcctctaccagccgcccctggcgaagtccattgtcggggggcctctaccagccggccgtggcgaactccattgtcggggggcctctaccagccgccgctggcgaactccattgtcggggggcctctaccagccgcccctggcgaactccattgtcggggggcctctaccagccgcccctggcgaactccattgtcggggggcctctacgagccgcccctggcgaactccattagtggggggcctctacgagccgccccggtgaactccattgtcggggggcctctataaggcggcccggtgaactccattgtcggagggcctctataatgcacccctggcaaactccagggctcgactcaggtcggatcgagcccgctctggggtttcactgaaatcgtcagcattttcagagacagcaggagccctggatgaaaggaagactggcacccttgtgtgggaaggaccctcccccgattttggaacagaggaggcagagctcctcctgaaaggtggcacctgccccggggctctcctggttaccccggagcaggatgaggccaggaggtgagcgatgaggccaaggttgttaggaaaggaggggcagctgggt

SEQ ID NO: 8310 - DNA, 370 bp, Homo sapiens
gaggcccgacctgggaaggctggcgaacgctaaccggagggtttttcttccagacttgattccgggatgttgagatcgttattcgaaatagactagcattcgagtcgcctgtgatggagggagttcctgcaccgtaggcctggcctcatttattctgcaaatgtttattgggtccttgccctttacaagatcctgtgctgtgagcaggatcagggctttcatgtggaaataagtcggcctttggttgaccaactgaaactcctctgaatggaaaatcaagaaatttttggaaaacttagtaaaatgttcaatgagttgcatataagtattccttgtttaggtagcctggactttgtgaacttgagattct

SEQ ID NO: 8311 - DNA, 434 bp, Homo sapiens
ccagagcgagactccggtcttaaaaacaacagcaacaacaaaaaagatttgatgcctctgatggagctgaacatttattatacagcaacagcagcaaggattgctggtgggcagactacactgtagggcatctggtcttctgttagagtctgaaggacactattgtcagagctctgcccttttggaatgaagaaataattcccagatccaggaggggaaacaggtgttggttgagggtcctggcagcagcttttctggcacagtcgagacttgggaggctctcccggaagggggcatcatggagctgagcctgcccactgggtattccattgtctatgaattgaacaggaggagcttgaagcccattgagctcatgcaggtaccaggagacgaagagggtgtgcataaagacatggaaggggtggtggttaggg

SEQ ID NO: 8312 - DNA, 482 bp, Homo sapiens
cacgtttcacagatgtggcaactgaggctcagtgaggtgacctgccaacatcctcaggctcagcagttctcaagcactactgcccactgtacctgattgcctgggtctgcgcctgggcccccgcccttttacaaaagggtcacggcctctcaagagctggacatgaaggatggggcaagtccagtcttgatcggtaatgcccacttgacactcccaggagcagcatcatagcatttatacaactccttgtctcattcccgatgctgggcacacaggccatatcagtggactcccctcacccgtccattcagttacaccacttaagcctgcccatgaagacaatggctaaggtgacagttggttacataaattgaagatgagtctctcctccagatgcatggtccgtgaagaaatttaatagcaaagacgagaagaagatacaagtctttaatagttctctgggtattttctcacccaaacag

SEQ ID NO: 8313 - DNA, 466 bp, Homo sapiens
gacatgccccaggggacatcagaggtctctctgcatggggattaacaggagaggaggaagccctgacatgtccaataaactcaatcatctggaagatagctcagtaggtgtatccttgacccagcattgtgggagaagatatgtctggaatgtgtatatctgcggggagtgagaaaggaatgtcagcagtcaggatgtctgcagatggggaattagaaatctgtcttagtgttggtgggagccagttcaaaagagacttcagaaggattgatggtttagacggggtatctatataggacctgtttagattaacttcagtggaatgagggatgatgtattaggataatatagttagctgtaaccagcaactgagctgtaacaaagccactgacacttctcactcatattctatagtccagtgagggtctaggggacagggggtgctctgctccctccattctttctg

SEQ ID NO: 8314 - DNA, 322 bp, Homo sapiens
acagtccggtaccagatcgccccatctgccatcaagaatcaataccacacactccatccacaccactcccagccctgagaggggctctggccagctctgctaggtctgagctgtgtctatgcccggatgtggcagataaggagaaccatggtaggagccgtaagcagctgtgcgcaggcagccagagggtctcgagggaggaaggcgagcgggcgggcggagcctggcggcgggccacagcttcaagagcccaagccagcggtgcggctatccgggggatccatatagagagggaggtgcggcgcacggccatctagagggg

SEQ ID NO: 8315 - DNA, 562 bp, Homo sapiens
gctgcagccaagattctgggggctggggtggcgggtggaggtggggttggagggagcgggaggaagcagccagaactaccaggcggcattgcccagcttcttctgcttggccgcctcccccgccagccggccggctatttttggcatcttggcagctgagcccccctcggcatccccccaggccccgtggcccaaaccaggttgtgcgtctcctcacggttcccactggccttcgatcctcatttgctaaatatctgcgaaggcagctcccgcctccccagtgcctacgcgaatttaatcccagagcgaacagacgcggagccccgggagactgcttcatgtcagagatgaattgtacgtaagtgaggacagggtttgtatcttgcagctgtaattcattaagatgaggtcacgcaggagcagggagaagcctaattcaatgactggcatccttataagaaggaaatctggacacagagacacagggcacgggcaagtcacaacacaagcagagactggagtgattcatccacaagtcaagtgacaccagggatgggcagct

SEQ ID NO: 8316 - DNA, 418 bp, Homo sapiens
  misc_feature (1)..(418): n = A, T, C or G
tgctgatctgactgtctttttagtggtcacactatccttaccttctgtgcttaccattctcttgtttactaatatgatatagtacatttctcatgtctctctaagaaagattgttaatgtatggctggttctgcttcatcttaaagtatttatactgtatgtggtcttctgctaatctactgatatctgtggtatgattattagaatcatatatatttgtgcttgtggttgaatgtagtattctatcatttggtcatagtctcataattgctacattgagctctgcatggacatttggatgctttcttattttatgctagtagtatgtgtgtgaggacagattagtgatcgagaatcactggaatgtggtggtgagatatatatatnttctccatatctaagtaagggattatatttc

SEQ ID NO: 8317 - DNA, 242 bp, Homo sapiens
accttctgtgtaagagtcagtgagagtagtagattgagatgtgagaaatagtagagaattagatataatggagaagttggggtggggtgctctttgaggactagctgctgttcgtgtgccttgtgatgccttcagggtgctgcttttgtctgctgtcgggtggatgtttagggtgaccagtggctggatcatgtgcggtgcatgtatacttgtatttgatcgcaggtagttatagaattatt

SEQ ID NO: 8318 - DNA, 258 bp, Homo sapiens
ggcgaatgcgagtgaacctcgactggtcttcgattctactaggttgtcactatgaccaataaccacccataagaacctcattgtttactatttggattgctgtgtatatacaagacagatatctccctttatggaaggagtaatatgatgaatcggtatgggatgggttgcggtgtcttggtcgtgatcaagctagttactattgaattgggggccgcgtgcatgtcgatcatatgggcagaaagtcctagcgtggtt

SEQ ID NO: 8319 - DNA, 546 bp, Homo sapiens
ggtactgaacagggaaagcatacctcaccacagcgattagcatagtgcttccatgcgtgatgtgacgccatctacttacaaggggtggcatttatatcagtaacaggatcactggtgtcatcatgagtagggtgatatacatcaatacccaggaccaagcatgatcatcctgctaatactgtcatgatgtgggtggggatgttccagacaggaaccagaggacaggagcgcagtaccatgacaagcaagatgaccagatccttcacagacataggggaaattataatgactctgcctttggactataggtataaataatggaatggtgaaggcttatggacatgtgtgtctaaggtgacatgtaagcgaatgatgagaggtgacttgaggcacgggctccaaagaatctcacgatgtaagctgtccggccataagtgcttgagacagaacagataggacgagtaaccaatcggaggggcgcaactcactatacaactattctatccactgtggaacgcatgattgtgtggatggtacagatacggc

SEQ ID NO: 8320 - DNA, 274 bp, Homo sapiens
gtactatctgtgaagttacacttttttttttttttaaaggtagagatgtgtgtgtgtgtaggtattaaagatgtgttgttggttactaaaatggattagtgggagatgagttatgaatgtagatgtattcagaagtagggtgacagattttttggtgacatggcgtggtggggtggaaatacagtggagtctgaaggttcggggagcgaagaatggcaatatcatcgcacatccgtgctccacacagcgctagtgacagatggagacctcatag

SEQ ID NO: 8321 - DNA, 290 bp, Homo sapiens
gccgaggtacatgcctgtatacggacatcctcttatttaagtgtttgtctctttcgtcattggggactccagcacccaaacatagttccctagtatactagttggtgccgaataaaaagtagctattattagaaaaggaaggtgaaattgacatgggagttagtaaaatgtataaggaaaatgatttttataggggaaaggtaaaggattttctggccggaaaaagcagcaaaggacaagtattacttaaagtcttgtgaaaataacacttcttcttgcttgtacctggc

SEQ ID NO: 8322 - DNA, 242 bp, Homo sapiens
gcccgggcagggtacaagcttttttttttgtttttttttttttttttttttgggttcaagataaaaacaaagtacaaaaggaaaatggggtgctgctactaatgcatcatacaaaccaatagcactgccgacaccgccaactcaagccattccaaccaaaggaagaaaggctggcgtttgcaccccctgagggaagggctggcttgtaaaacagcacaattcggagtggaatgggaagggta

SEQ ID NO: 8323 - DNA, 226 bp, Homo sapiens
ccgcgtcggggcagggtggcttaacgaaaactggaaatgtctgttgatggggaagaaacaagagctaatacaatagctaggagcaaataatatttctcttatatagcttgaaggtagcaggtacagtagctaggtacatagtgaaagaaggattacgatggtaatgaaataatttgtttgatacgctaatggctataggggatattgtgtaatatttgtaagtttg

SEQ ID NO: 8324 - DNA, 290 bp, Homo sapiens
acaagcttttttttttttttttttttttttttttttttttttttaaagcattaattaattaccacactttagaaagtatgttcgccggtaatatggaacgtagggggcaataaataataaaaggaggcgggaaaaaaaagacagatacggggaacatagggggccccgcggctccaggggcctcgaaaggtctatcgcgggaccccaccccccaagaagaaaaaaaccccaaaagccaggggaaacccccccgggggggggtaaaaaggggggaagggcccggggctccc

SEQ ID NO: 8325 - DNA, 226 bp, Homo sapiens
agtcttatttagcaccccagccatgtagacttctcatgctggcccttcttggcatctgctcttctcactgtcatacattgtgggaaggtgtaggggagtgtaagttctcagtataagtaagaaccctgtgtgagaccctccactacccagcgcactggccggtttaggaggaaatcaagtacactacaccaatcacggaaaggtctccttgcagagccagttaatt

SEQ ID NO: 8326 - DNA, 194 bp, Homo sapiens
cgggccaggtacccttatggaccctggcacaaaaatgattcagcttcagcgccttttgcctgcagttgcaggctttatgaagcaggttctccacctccagtaaattaaagtttttaaacaagtacccagggagaacggggaccctgcaccctggattactgggactggcacagtgggaggaaggggggaccgtg

SEQ ID NO: 8327 - DNA, 306 bp, Homo sapiens
ataagctagactccaatattccacacagctgactgatacgtggatgcaataacatgtgcatttcttaatactacaacttcatggacagagtagggtggtgagatgaatttgactgtgtctaaatcagtgtcctaaatggctggttctgtctgtgctcctttgacagagagcaagacagacggtaagtaggagattgactataatggggagatgatcgactgtgtgtgagagggggaaggggtagagagaggagggaatattggtctcagaggtctcaccatcttaatttggttgctcctaatgata

SEQ ID NO: 8328 - DNA, 530 bp, Homo sapiens
tacatgaagtctgtcttttgtcaaagttctatgcagtcccaggatagcgtgatagcagtggttaaacacaaccagctagttatagctttcattgtatggaaagacctctctggtctggaactctgcctttgaaattatccacgtagttcagaaggcaaatacttgttaaagggatcccaaaaggtaggagacaagtagtttttgttatgcattagggcagactttcaagcacaagacacaaaattgagcagcaaatgtttgggtagtcccatctcccttcggtttatatgtgggtagtaaaataaataaaaattttcttctttgtctctttcttgaaataaaatatcatgtatccaaagagagctgaggattctcaatttgctagattgctttaaaggggtcagatttataaaaataaagaattaatgaagaacaattttactggagttagtgtggtcaataggcccttttcattttgtgtcattgcttttatcacaaagatgttcaaatatcaaataaaatgttctctc

SEQ ID NO: 8329 - DNA, 162 bp, Homo sapiens
tttgtggaaggtgaattattgcaattttatcttacaacacaatagggaatagtgaattgatatataaatattatttatgaataaaatactaagactacgctagttagatgttgcaataaatcgaaaagggatatatggtgcataaaaagcaatgcgctatgc

SEQ ID NO: 8330 - DNA, 450 bp, Homo sapiens
gtacagcttaattctatgctttgtcctgcacctatcctgaataaagctggagaaactcttgatgtttcagtgagctttaatggaggaaaatctgtcatttcaggatcattaattgtcacagccacagaatgttctaacgggatcgcagccatcattgttattttggtgttactgctactcctggggatcggtttgatgtggtggttttggtccctttgctgctaagtggttattaagggatcctccaccacccccccctgcaccaaaagaggaggaagaagaacctttgcctactaaaaagtggccaactgtggatgcttcctattatggtggtcgaggggttggaggaattaaaagaatggagggttcgtggggtgataaaggatctaatgaggaaggtgcgagggtagagaaaggcaaaaatggtgtggtgaagattcctgaagaaaa

SEQ ID NO: 8331 - DNA, 229 bp, Homo sapiens
ttattcagtgtatttttaggtggtattattatgtttattatttttctcattgatttagtgactatatcttcatcatgttttcatttttatttgttccgaagctcccggaaaatctaacttgctaacaattatttaaagggaggagagaggaaagcaggagcagctgcaggaacagcagcatttttgggtacctgcccggggcgggcgctcgacaatcactagtgaattc

SEQ ID NO: 8332 - DNA, 370 bp, Homo sapiens
ggtcttttggtgggagttgagcgcatcaatttggggtggtgtatgatccatgtttatacacattcatgcttccataatgcggttgctatagggatacgagtgactttcgtgagtgccaatttgacatcatgtctgggcacaagatctttatgtgttctaaattgagaggagatgatctatgacatccttcacttttatcgggtaatactacatgtatagttcagtaatgcgggagggtctctatagacattttgaatttcctagcataatgtctcaggaccgtggtgaagcattatatggtttttccaatacatggttgggacgcaaggcggcgtgtcacgtacggccacaggcagttcattgcccgggc

SEQ ID NO: 8333 - DNA, 530 bp, Homo sapiens
ttcatgatgggttactcttttatgtctgaattcatgtttatatatgcgtatagtcatctatcgtatatctataattatttataatatgtgttatctgcagtgataaattatgatcttgatgtcggtggtgatgattaattgtgtgactcgtcattactatgaagatgatcttgaggctggtatcgtctgtgcatgaaggtgattgagtgctggtgcacaggattttaaagatggctctaaagtgtgcatagaggttggtgttcagacaaaatatgaagatgagctaggtgatcggatgatggaaatacacttgtggagcgtgattctaagactgaagactcgcttgatgatatcctctaagatgaacgagtcgatgctgatctccgcgttctcaggggatcactgagcgatgaaagacaggatgaggtatgagtgtggtctcgacggccggtcggtgctggtggccgttgggatgtgacagcctggagatgatatgtgcataacgagatccagatgacaattccaggctg

SEQ ID NO: 8334 - DNA, 306 bp, Homo sapiens
gatgtggtggtggtctctattgagcatgtgcatgcactcgtgtagtactggaggacacagtagctctacagcgtcatgtggcagaggataatgatctggctagttgtgttttatagaagcagctatctaacagctctcgactcgcgaagacgctctgtcgggattggctgtaagcactacggatgtcacatggtgtagtggctggtctgcaatgagtggtgctgatggctccctgtggttacgagtctgtattcctattcaccgaagggtgtgctggagtgtctgtctgctgtctattaatacacc

SEQ ID NO: 8335 - DNA, 178 bp, Homo sapiens
atacaaaacgcgcaatatctaattatgaacagcgttaaatccctatcaaagttcaaatgaaatgtgtggcttatagtgtgaatgcacagatatatagccatatcatgtcatgttgtgtgcggagttggggtgggaacacgcagaaccggagccacgtcagctacacctcaaaaagtgc

SEQ ID NO: 8336 - DNA, 162 bp, Homo sapiens
agagggaagagggttaaagaaagatgataagaggatcaataaattaattttatgaaataaaattaggtcataggggtatggaggaaataaagaattagatgattatggtaataatgtgtaaaaatgtgattaagtgtaaagggaggtatgatgagaggatgg

SEQ ID NO: 8337 - DNA, 338 bp, Homo sapiens
tgataagatgtgaatacatatagtatcatactatataaataattcttggggtgtactatgtgcacaacattaataagtatatgggaacatgttcggcttatgctgcgttgcgatatattgtgatacagagggatctacgtctaggtatgctgatggaactagtacgagtgatgctcatatgaggtctgcctagcgtccataggcagctccacatgtacattcactgaaatgttgttgtgatatctgcactgaggaagcgcgtaggttatatgactttgtcatatttggtcgtgtataggcataatggaattcattcagtttagtgcaggaaagcacac

SEQ ID NO: 8338 - DNA, 610 bp, Homo sapiens
ctactttgtatcatctcttctattattttgaaagactgtttaatttttcatgtcttacattcccaactaaagacctaaaattgttttgtatccccactcaaaatgccttacagaaaatacaaaaatcaatttgatcgtttccttaattacaggagtcattgcaattagttacataatttgactcttggctatcagagttacattatttgaacttaaataaccatcttcctgtaactgaatataatttatattccctatctccagtaattaactggcataaaatacagaaataccaacaacaagtagtgtaccccactggtaaagtgcatagactctgtggttagacagactatataggattgctgaatcagatactacaatacatagcagtatgaccttaaaccattgtattaagtcatctaatcttctatatcctcattgtcaaaaaattcgtgtatcagctacgtacgaatactagtgtatgaccttccacaatcggcttaagctctctactaatcaatttactcatagtacaaaatggggaagaaaacagtatggtgttcggaacgcacacagtgactgatggagagtatgtgctagggagaaggga

SEQ ID NO: 8339 - DNA, 194 bp, Homo sapiens
  misc_feature (1)..(194): n = A, T, C or G
tgaaagctatataattagacattgtaaatgccttagataatttatgggnattttatctgaagaggtaatatgacatattggattactttgtgagtgtgaatataaagataagagaaggatgagagaaggatggtgatatgagggatgtggatgagaaagaggaagagtgtatgagagaaatgggattagagaaa

SEQ ID NO: 8340 - DNA, 210 bp, Homo sapiens
ctgacatcaccgactcatatgcttattaccaccctgcttgagcaggctggctcccaacggagatgaacgaccgtgttcctgcctggttgttattcgacatgctcaggactgcggggagaaaggatgagatccagcagggaagaactgcctgctgccagcacgcaggagagggtggggctgccggccattatgtccataccaacacaatgt

SEQ ID NO: 8341 - DNA, 338 bp, Homo sapiens
ggtactcatggatccataggaaagcatgtcagtgcctggtggccacactatacatggaattgtggagtatgaggaatatggcacgaccctacctcttcttaagacagttgcagttcacagggagaggaggaagatacatcaataaccccaaagtccatgaaggtgcaaagagttatgtggggctgcccaggcagaggtgacaaatgcccactggtgacaagacactggtggacatagagggaaaagcccacatagaaaggtttccaggcagacaggaagtcaaggcagttggggacgggaagtcaaacaagtgatgctgggacaccgctttgatgggt

SEQ ID NO: 8342 - DNA, 322 bp, Homo sapiens
ttcctgataaaggggactttccatgccgtcaacagggaagtatctgaacatactgccttataccgattgtactcactatataaggaaaatgggtgcagtagtgtggttcactgagtcgggtgggaacaatgatggtgcagataactgccaggagtaactcattctggtgataatagatgggacgtgtgcagcaacacaaaaataagccgatgaaagaaaagtcctcaatagagtgtgctgtagtgtactgggcaccagtaggcctggtgccccctggtacatgttaccttcggcacgcgtaccatcgcttattcagtaagtg

SEQ ID NO: 8343 - DNA, 178 bp, Homo sapiens
tgttccagaagttataagaatgatatactatcgatttttagaagatggatgaaaaagttgtatgctgagtcatacgaatgaatgaggtagacatgggaatgtaagtgtcaccatgttgtgatatgtgtgatcttagggtaaagatgaatgaaatatagtgagtatgctcccattcttt

SEQ ID NO: 8344 - DNA, 160 bp, Homo sapiens
acctagaattaaaaccaagactctgtgatcagaaatcctcaggcccggtcccttgttgcctgtagacaatgaaccaaaagatggcgagttcaacagtgggacacaggctgggcatgatggctcatggctgtatatcccagcactttaggaggccaaggta

SEQ ID NO: 8345 - DNA, 194 bp, Homo sapiens
gaatttagtaaggctttgggcataatgaattagaagcgggaagaggatttgtgcagataagttatgcttcggggctacttctcccatcaagtcaaatctcgtctgaattctggctatctctctagccatgttgcttccgcctctcaacaattcaactgggtggttgaatttagactccgggttctaatcttggt

SEQ ID NO: 8346 - DNA, 226 bp, Homo sapiens
caaaaattgggacgaagaatgatgaaaagtaaatttagaatgtgctgtgccgagaatgaaagaaaaagcagcgtggggtctgcgtatccagactgggggagtggagcaggaaatcacttagcccagagtggcgagaaccctaaaaataaaaataaaataaaataataagaaatggagcagaaggcgttcataggagccaattttattaactaaaccaaacccatga

SEQ ID NO: 8347 - DNA, 546 bp, Homo sapiens
ttcagagcagactaacgtgggctgccattatttctatttatatgtataagagtatgtcttcgtgatctgtataaaaagtgatcgtgtgaaagatgctgattgtcagtatgttatgtcaatgtaatcaaacataattgatctctttaatggtgtaggagatgggattgttctttgttaggtgatgatactgtcagtgacatacaaaatagatgaaagattaatcaatcagacgaaactacgcttatcactaatgaagaaaatgtgaactgggggttgaacataggcgtgagcatcgggtgccttggtggtcataatagaggtatgatgatcgtgtggaggggatagctgatctggtcatggacttctgtgggtaggtgtgaagatgtgttgtgtgctgacatcgaactcaatagaaatgaggatctgattgtgctattgatagagtgtgtgaggcgtgaggatttgctgattctctgcgctgaagagctgtgctgatgtgggctagttaacctgtggagacatgcaggctgcaatgaatgtgggcaa

SEQ ID NO: 8348 - DNA, 354 bp, Homo sapiens
tgagtacttgaaaaaatgaaagtgagagatgtaatactgctggagacaagtggtctacttttacttctaacttgtaatcaatgtgagcgatgatccattatcatccaaatagagtgtggagactatcggaggatacgtgagtgtcaagtattccaatagcaattaaaacaaatgacatgacttcgagacagctgactacttatttcggtaatgtgatttgaatgtgcctggcagtcgcaatatatgagatcgttcacgtgatggctgatgtgtcgccagcatattatatagggtagcgaaaatggagtgagatgctgttgggaggtcgatgagcatgtgattaatggttgtctg

SEQ ID NO: 8349 - DNA, 162 bp, Homo sapiens
ttttttttttttttttttttttttttttggtgttttgtgcttttattttacgaaaaagctaatggcaaaatctacatttaaactatagatgaatccaaagcctttagtgagagaaaggctggtggggtgggattacataaaatggaccagtgggcatatctt

SEQ ID NO: 8350 - DNA, 210 bp, Homo sapiens
  misc_feature (1)..(210): n = A, T, C or G
ttngtgaggtccggagggtacatgctgtagtgcccaaagttgttgtgctttttttattaagtatagccagggattacgtaggttcaaggtcccaccagataatgtccttaatagaaattatgttaaacatttatattcctctacaaaataccttattttcccaaataaagattaataattaggcaggtattaggagaattaaaaaaactc

SEQ ID NO: 8351 - DNA, 162 bp, Homo sapiens
gctatgacagaatcattgtatgtgagcttaaggtctctgcataaaactgaagttaagtagggtagcctgcccgccaccatgagctgacttgaagagctactccctgcgtgtaagtatctgttggcacagtatgtagtggggcgtacgattccagaaacgcac

SEQ ID NO: 8352 - DNA, 854 bp, Homo sapiens
  misc_feature (1)..(854): n = A, T, C or G
ctcagcatttaatccaaacaggggttcttagtctcagcactatgacattttgggctgactacttatttgttaggcgggagctctcctgtgcattgtaggataattagcagtatccctggtggctacccaatagacgccagtagcaccccgaattgacaacccaaactctccagacatcaccaactgtcccctgcgaggagaaatcactcctgggggagaaccactgacccaaatgaattctaaaccaatcaaatgtctgggaagccctccaagaaaaaaaatagaaaagcacttgaagaatattcccaatattcccggtcagcagtatcaaggctgacttgtgttcatgtggagtcattataaattctataaatcaattattccccttcggtcttaaaaatatatttcctcataaacatttgagttttgttgaaaagatggagtttacaaagataccattcttgagtcatggatttctctgctcacaganaggtgtggcatttggaaacgggaataaacaaaattgctgcaccaatgcactgagtgaangaagagagacagnagatcaaaggctttagacagcactccttcaatatgcaatcacagagaaagatgcgccttatccaagttaatatctctaaggtgagagccttcttagagtcagtttgttgcaaaattcacctactctgttcttttccatccatccccctgagtcagctgggtgaagggagttattttttcaagtggaattcaaaccaagctcaaaccagaactgaaaatagagattgcaggaatccttttctaaactgctttgccctttcctctcactgccttttatagccaatataaatgtc

SEQ ID NO: 8353 - DNA, 642 bp, Homo sapiens
ccgaggtacatcagcatttaatccaaacaggggttcttagtctcagcactatgacattttgggctgactacttatttgttaggcgggagctctcctgtgcattgtaggataattagcagtatccctggtggctacccaatagacgccagtagcaccccgaattgacaacccaaactctccagacatcaccaactgtcccctgcgaggagaaatcactcctgggggagaaccactgacccaaatgaattctaaaccaatcaaatgtctgggaagccctccaagaaaaaaaatagaaaagcagttgaagaatattcccaatattcccggtcagcagtatcaaggctgacttgtgttcatgtggagtcattataaattctataaatcaattattccccttcggtcttaaaaatatatttcctcataaacatttgagttttgttgaaaagatggagtttacaaagataccattcttgagtcatggatttctctgctcacagaagggtgtgggatttggaaacgggaattaacaaaattgctgcaccaatgcactgagtgaaggaagagagacggaggattaaggggtttagacaggactcctttcatatgccatcaaagagaaagatgcgccttatcccagttaat

SEQ ID NO: 8354 - DNA, 338 bp, Homo sapiens
  misc_feature (1)..(338): n = A, C, T or G
ggcaggtacactagaaagtcttttacaanaataatcatccttagatcaaccagaagaccaatcttcaatgtncgtcctngacagagatgggttacnntttaacatccctcctcctggttttcgtcccaatgttcctcctttaggtagtggcgtggtaagttggttgttggtggattgccaccccccctcggaggaatgcccttgcccataaggtgcctctgggttggcccactggtaaggtcctgcaattatcccctggtccaataatcccattagttccccaataggttaataccccaagttataaattcataatcccgccccataggcccacttat

SEQ ID NO: 8355 - DNA, 498 bp, Homo sapiens
aatcgattgaaccgggaggcggaggttgcagtgagccgagatgcactacactccagcctgggcaacagggccagactcatctcaaaaaaaaaaaaagaaagaaaagaaaagaaaagttaagtgcagagaatagtgcctgacacacggtatacagtaggtgcaatttcagtattagttgctactattgtcataatcatcagagtgtttcaagagctgtgcctccatggctctccacatcgcttcacaaactcccctgttctgggacccagcctgaattgtaaactccacccccgactgatgctaccctataagccaaacagaatcatggctggggtaggggctctaccctttgggatctggccgaaccaggaagaggtagagtggcctggaggccaaccacaggtgattcagaatgttcaccacgtggttcatcctgtcttactcctgctttacacgagaagccaccatgactagtcctcctcctgcggggacagacct

SEQ ID NO: 8356 - DNA, 242 bp, Homo sapiens
tgggtggatggatcagtggacaagttagtggatggatggatgatgaatggatgggtgagttggttggtggatggattggtggacaagtgagtggatggatggatgaataagttatttggggagacaaatggaagggcaggaagattgatgctccgcatgttcctggctttctgcactaactgtactcgacgtcactagaaaaaaaaaaaacaaaaacaaaaaaaaaaaaaaaaaaagtctgg

SEQ ID NO: 8357 - DNA, 756 bp, Homo sapiens
  misc_feature (1)..(756): n =A, C, T or G
tttctttcacctgtcttctaattagagcctcttactcatctgtagcacgagtcatttattttgtctagtacaaagaatatttcgaatactcatgactaaagagctcaggagttctagctaaagaagaatcttgaagcattggagttttgaaaatctgcataaagattttgaagattttttaaagattcatattataacagtataccgttggtctaatttttcttaatctactaaaaacgaaatagcacaggtcagatgtgacttgcttgctttctgctcctgtacaatccaggagtgttaatcaaaaagcaaaatttgtgacatcagttttatttccatggctactgattgtaatattacaaacatgagattactggctagttcatcatgaaggttaaagaagattcctccttggataggatctccaaaaccaacaccaaagggaatattatcagagctgcttccagcagcgtgtcctttcaaaaatgttctcattattctgagagctttgttttattttgtgagggttttatcatttgttgttggtggttaatattttaattttatgtgcttgtttgttttatttattcctccaccccaggtgaccgtgtangaaaatggttattttagatgtnagaagcccctctgttaggaagcagtttctgccttcgtttaattcttcttccacaaataagatttattttggaacttcagtcaaaaacatctgtactttgtacaggacaaagatttggcttc

SEQ ID NO: 8358 - DNA, 370 bp, Homo sapiens
  misc_feature (1)..(370): n = A, T, C or G
cctaagtcacagttctgtcggactgtgggtagaagactaggagatggtgagtggagtgtaaggaccacatgccganagaagattgatagaaaccatgggtaactgtcgaatctgtcagtcccggcatgagtgtaattgctttctctggagggcctggcgattctctcctacccagtggctatgctttatctatcgagcttgtgcccggtctgcatttctgattatgttgttgtgtattgtgtgtatgtatgtattcgtgggaagagtgtgttcatctgaagcctgtggctgaggattaaggttaggattgggtaaagatcagaatatcacgtccagatatcgcagcgactccctgtggatagcccttggg

SEQ ID NO: 8359 - DNA, 626 bp, Homo sapiens
acactggctgctcggcagtcacgccggtggccggcgggagagcggggagaagcctgggtccgtctggctcttaccacaccatgctcctgcttccacatggcagagggacagtcagcaggtgtgcagcgccccagctcctacttgtctcaacagtcctaactggccatggccaagagttctgtcagggcaatcaactccctgacacaggccagatggacatccgggagaaatccatagtactggagctggttcagagccccacggaattaagtcggaataaaaccacgagagaaagaacattttcatgggccctgcacggagcctcctgggcctgatggagaggggccccacccagaagagcacagggctggcccccacccctgcaccacacatgcgctttatcaactgaacactcccacagccacacggacaggattcattcaagtctgtgtatgtctgagcgcaggagaagaggatctactgagctctagctggagcttcatccagcgatgattactaatctcgtgctccaatgcagctcccatcctctcgaaggggatggtcggcgaccggacgtctacgtcttggggcccgttccccgagctggggtatctctgacggcttta

SEQ ID NO: 8360 - DNA, 210 bp, Homo sapiens
ggctgatcgtgctcgaggaggaaaggaaccgtaggttcacgacattgggtgtatgtgctcggctgaggagtgaatggggcgaagcagcatctgttgggatcatgagtgaacggctctaagtcagaatcgcgaacagagcggaaagatagggcagcggcgcggagggtcgggtggcctgggatagcgggtcggcgggcatgctccgggggg

SEQ ID NO: 8361 - DNA, 338 bp, Homo sapiens
gcaggtaccaaaataagaggagcgggtgcaggtaactgatatttactgaatagtaaagagggaagcgtgaaggggccttggagaatggttaacagcatctgtttccagctcatcacaggtgcacagcataagatgagagttggctatggatgggcaaatcactgaaggtagatcaaagatgggtgctcagcgccagtcggtctcatcgatgcctagctgttatgtaattactggatcaaaactagatgttattagtataagatatatgtcagataaagatagtatttaaaattgtgttgtaagataagagaacacatacaaaaatgtggattcttaca

SEQ ID NO: 8362 - DNA, 578 bp, Homo sapiens
ggtacatcagtctcagattcatcccagaaaaaagaagagcacaattattctctttttgtctccgacaactggggtgaacagccaactaaatgcagtcctgaagaagatgaggaggacgaggaggatgttgatgatgaggaccatgatgaaggattcggcagtgagcatgaactgtctgaaaatgaggaggaggaagaagaggaagaggattatgaagatgacaaggatgatgatattagtgatactttctctgaaccaggctatgaaaatgattctgtagaagacctgaaggaggtgacttcaatatcttcacggaagagaggtaaaagaagatacttctgggagtatagtgaacaacttacaccatcacagcaagagaggatgctgagaccatctgagtggaaccgagatactttgccaagtaatatgtatcagaaaaatggcttacatcatgggatttatgcagtaaagaagtctcggagaactgatgtagaagacctgactccaaatcctataataatcctccagatatgcaatgaacttcggaaattgaattaggtgattattgatctgacttc

SEQ ID NO: 8363 - DNA, 194 bp, Homo sapiens
gagggtatataactaggggcatgaagtgtgagctatcgttaatgagaatgacgtttggtttgctatcgctatggctaagaatgggattaagagaggaagtggcaaaaaaagaatggacgtattatgaggttttatgccggagcgactgaatatacaagaatgggggagaagaagctttttagatgtccttaata

SEQ ID NO: 8364 - DNA, 226 bp, Homo sapiens
cgagtactaaaatatctagttgtttgatagataacttaaactcattaatgatagatcgtaaagatctatagtcagtctcacaacagatgaggtattatttgtatgtaagtttcagcgtttgtgattggtttctcttttggaataatgagagaataaagtgtgtattcttgtgttttccctgataaatatgcataaggggatggggttaaacagtgttgaatatctc

SEQ ID NO: 8365 - DNA, 306 bp, Homo sapiens
tactgaaagatatagttaaaagatcaataacttaaatcagaattaatgttacgtaaagtcttatgtttcacatcaacacagatgaggtattataagtatataaaagacggtgtgtggggaaagctaggggtaagtatataaagtgagaattcgggtgttgtggagtgagtgttgtggtatatgtgcatttgggttggggtggtcaagtggtgcatagagtgaggaaaccatttctgcttggggtaatggcacatctccttgcgcataatggtattgaatatcatatattctatggagaaagaagtg

SEQ ID NO: 8366 - DNA, 290 bp, Homo sapiens
gaggtactgaaaagactcagtcagccccatcatgactctgatgaaaagagaggatatgttcagaactatggtcagtatcttccctgtctaagggattataagtatcttcccctggcagagctgagggggccataggtactgatctacagtgatcacagtcttggtgtgtagagagtgatgacagctagctcgactagggagggagtgccaaaaggtgaatatggtgagagaagcctgtgtgctgatggatgtttactcatctcctcggacgtggacgatattcactatct

SEQ ID NO: 8367 - DNA, 290 bp, Homo sapiens
aggtgcatattgaggctacttagaggaatgtaagacaaaatcctgtgaataataagcatcactcagaaccaacagcgaacagatgtagtgttgtagagtggataagtactacaaggctcacaatactacggattattattattaattggtcttcgtgaatagaaagtatacggggactacggagaaaagattgctactgagtcatgattagttataagaggatgagtaacaactacaatgtgttctgactcattgtgtgacccagcaccatcaccattcctatgcatctc

SEQ ID NO: 8368 - DNA, 466 bp, Homo sapiens
taccagcagagtcagtggggctagttgttatgtcctgtatcagtcactggtgatgggcctacctcataggagataaagattttctatgtagatgcaagtaaagtgagtcggtgtagaccagaataatcctcttctaaagaagggtctatggatgttctagggagtatgatctctctgatgaaagatcaatagttgtctagagtagatttttatttcttgggatgttgaggtgggaggatggttagatactataaggtagcggttgattgagtcgagattgtgtcaatgcatcagacttgtgtgatagagtgagacacttggtctgtttggaatctggatgatattggtcgtctctttctgatggtcgttgtttctccactgtatagatcatcatgatagcatttggctgagtaatatatgatagaagcgctgtgcgggagttggaggatagagatgaatcggggta

SEQ ID NO: 8369 - DNA, 194 bp, Homo sapiens
gggaggtaaaataagagggaggagggggtttagggaaattgattttagtggggtatatagaaaaaaaaaaatttggagggagaagattaaagaagttgagataaataaaatataaataagtgtattaaaaagaaaataaaaaaaaatggttaaaaaaaaaagtaaaatataaattttgaaaataggtgaatagt

SEQ ID NO: 8370 - DNA, 226 bp, Homo sapiens
gaggtggtggttgaggagaggttataagggaaaggataaagaaaatttattttatttataaaatggagtttttcaattttaatttggaagttagaaagggataaaaaaaaaaaaaatgatgggtataaataaaataaaagaaaaatttagggtaaaaaaggttggggattttgggatttgggtttgaggttttgaaaaaagggaattaaatatttttttataagat

SEQ ID NO: 8371 - DNA, 210 bp, Homo sapiens
atgaacaacttaaaaaaaatacaaaacctggatcaatggggcttctgggaaccgcgtatcttcccctcacccaaggcagtgggcatgaatctacttttaaaaaatgattaattttggccatctgagaagaaaagagcctaaaattgggtgatgcaacgagaaagtgaaagtcgagggaaaatgcagtttacaagtctctgaaatctaatg

SEQ ID NO: 8372 - DNA, 306 bp, Homo sapiens
gtacaaatcttatgtggtacataataaacattgtaaataactaacattctttacacatcttcattggcctgctcatctatgtttctaagccaataggtgatgttttaaaattatgtacagtaggtgatgtgatataataacatgaataacatagagcctcagaattagggagtagtgatggtgtgaaatcgattatgggcatctgtatcccatatctgtaactagatattttttactagtaattcaacatgttttgatcttgaagtatattactatagtgggaataaaggtaataaagaaaggatc

SEQ ID NO: 8373 - DNA, 386 bp, Homo sapiens
actttcaaatagctagttggatagtttgaattgtataacagtaatacctggataatacttactcgtatatgcgtgattaatacactctgaatcatatagatagtgattgtatgcatgatctgcgagtcattggttaagagctgaacgactatgtggacagtatgttaaacatggaaaagatggaacacaaaagagaaaaggatcccaatgagaaaaataagaatgattattagtattgcaatgtgaaacttaaagggaagaaggaaaagataaaaacggattggtattactgaatcagttgaatagaatcggataaaaaacaagcagggatagcggatcagacatgtagtaaaagcaactcgcccgatctggccgcaaaaagcacc

SEQ ID NO: 8374 - DNA, 530 bp, Homo sapiens
atttatttcattgctgaccattaggttgcagcatgcaactctcaacaatgagctgcccctctccactcctatagaagctccaaatactatggtaccactatgtaggttttcagcctttcaaaggcttttattattaacatcatcattacagaataaacattgtactaccctcagggaccaaggaagtacatagggttgttttccttttcttaaaatagccccagaattatgtttgctttttatagcttttttaatctctcttgtcacttcttgctattaatggtgctcctgcctctgggactctgccggccgcctccacccacgacttaaacaacatctcaccaattgcaaccggatcgtgggtgggacttccgctatcattttaggctttactaccaccatctcctcgcgggcagtgggggcaaccgcgaagacagaatttcacaaactttcagctccagcagtttcaaggaaatgttaaatgagaagatggaagaccgagtgtgaagagctaagaaaacaaaaagggg

SEQ ID NO: 8375 - DNA, 335 bp, Homo sapiens
tgaagggtgagctcctgggacctcagacagatccttccctctgatcctgccctgttgttggtatatctggggagtgtgtggcccagagaagccagtgatatatccaggtcacacagcaggcctgggtctagcatctgtctcctggcctccaggccattgtactctccacagcacaagtccgcctctcaggttcttttatttacaatgaaaccatttacttacacagttatcgctgcccactgggcattctttgggcagggagatggagttttgttaggtgggctctgcatacctatgggaactcagtgatgtaatgcaaagaaaaataaacttac

SEQ ID NO: 8376 - DNA, 482 bp, Homo sapiens
ggggggtggtggggagacgggggctttggaaaggaagcgccggggagaccactggtgttttagcgagaaggggggagcctaattcaaagccgggggggcggagccgataatagggtgtggggggggctttggggattttcggtgtgggggggggcttccattttttgggggggggggggggggtgagcggcgactcctcggaaagaaaagcgggcctggcggggggttggggggaggccaagtccggggggggggggctgctttttttcccggggaaaatgggtgggggcaaaaaagggggggggggggggggcttttgccgctggttaatttgtttcccttttcttttaattcgcccgggggagttttttttttttggagaggagggggagtaaaaggttatgcccgagcggcaacaaatattttgacagaattgcgccgccttgctcgtgaacaaagagaaaaagaagaagaaaaaagac

SEQ ID NO: 8377 - DNA, 322 bp, Homo sapiens
ggcccacccgcggtctctggccacctgttgccgtccatcacggggccacccttcttcatcctccgtcctgtacaatagctcagcaaagcggctggcggactggcccgggatctgctgctgctccagccatctacatgacaaccagagcctgggaggagctggatggcggcctgggcagttgctaagccctggaggactactctgtgctggccgagaccgaggaagacagggcttcagcgatactcaggctggccgacttcggcagcgcgccccacgactttgaggtggctgaaggctggcatgtggacaccaggaccaagaa

SEQ ID NO: 8378 - DNA, 162 bp, Homo sapiens
ttagtttggttgtatttttagattatggtataataatttgaaattataaatataaataagtagttagaaagggtttgaattaataatttggtgaacggttttaatcgataggtgttgattagatgaaagttagtagggtgatgtttattatggttgatagtt

SEQ ID NO: 8379 - DNA, 258 bp, Homo sapiens
aaggatgcaactcctgtcttggatagcactacgtcttgaccttgctcaaaacggtgctactaaatcaagtactacacacaaaaatgactggcaagaggagcatgtactgctggatttatagatgatttggaatggaatttttacgttctagaatccctaacccaccaggatgctcacatatatgtttgacatgccacaagaaagacacagacaatgaaacatcttcggtgtctagaataagaactggaacgtcgcgag

SEQ ID NO: 8380 - DNA, 162 bp, Homo sapiens
tattgatgagatctcccatatgatacttctcagtcatgtaccattttggatattcgctctttcactgtatatattgtgtcttgtgtttggagtgtaagtctcagatcagaggatctgttgagtctatagcataaccaaaatggagctgctaggatttattca

SEQ ID NO: 8381 - DNA, 210 bp, Homo sapiens
  misc_feature (1)..(210): n = A, T, C or G
gctactagttatcctactaagagaaaaggcaacatggacagcttcaaatttcgcaatgtaagactagccattaactggggcctggacgtgcgcggcttaactttggacataaccacatagcgataaattttacgaccccagtgaaaacaatgatttccatacccagctcttattccttcaccataaagattctgtgtnagcaatttaaaa

SEQ ID NO: 8382 - DNA, 562 bp, Homo sapiens
ccatagtccctgcagagatgaatccaggtggaagaatgcagaaaagctttagaaggcatagatgagaagattagcaatgaagtcttaaaaagctcaccatcatatgcaatgaggagaaaaatagaagaaattaacaatgggcttcataatgttgaaaagatgttgcagcagaaaagcaaaaatattgagaaagctcacgaaattcaaaagaaaatgtgggacgagttagatctatggcattccaaactaaatgagctggattctgaagttcaggacatcgttgaacaggacccaggagaggctcaagaatggatggataaattgatgattcctttcaagcagtatcagcaagtatcacagagagcagagtgtagaacatcacagtagaataaggccacagataagatggaggaatatagtgaccttctgaagagcactgagggctggatagaaaatacacgtcatttgctggccaatcctgctgactatgaatctttgggggcactgagttaccatggtagcgatgtgcagatgggttaggaagaatcaccagcggaagcaa

SEQ ID NO: 8383 - DNA, 242 bp, Homo sapiens
actggcagctacgagcaaggccagcccgcgcagcacctagatagaaggcacgtggctgcatcccgacggttacagcctcgcgtctttcgggactcgctttctcctgttcgcgagtcgtgggctctgggcgctttatcccgaggaatactatgacagtggacatcaaaccgagcgctatagcaaggcagaacccgaggagggagaaagacgggagccggtccttgaaagcgccaggagacagc

SEQ ID NO: 8384 - DNA, 697 bp, Homo sapiens
tggctgcgcactcggcctgagaaactcggcaagcgcgcagtgtcgactccccggtctatgccaggcgcatctcaggaacgaggtctcactatattgcccagactggtctcgaactcctgggctcaaacagtccccctgcgttggcctcccaaagtgatggaattacaggtgtgaatcactgcatctgactatggcaaggatctctgtcactgaggtaagtttggcttagagattaaagctccttctatcttgtgatgccaccatcacaaggttctcaaggttgttgtgggagaagagaaggctaaaggagctcatagaatgcctttaatgctaatccaaaagtaaatgagaaacttagaaaaagattgccaattccaaatcaacatatttagagaaaattggaaaaggagaagcttactacagctttatttgaggactttttaaagaacgctgggttctatctgtgagctgcaaatcttggagcaaaaaccagagacattgccagagcaaacaagaacagaaatacaaatggagaactggtcaaaagacataacccacagttatcttgaacaagaaactagggggataaataaaagttcggaggcagatgaggcaatgaatatgaattctgagaaaagtatggattggaaattcaatgaattaatttaatgaaattaaatgtgagaaaaaagaaagg

SEQ ID NO: 8385 - DNA, 386 bp, Homo sapiens
aggtgagttgggagtcagttcagaaagggcagagggtcccacaacaggaccagaacccagcgggggaacctggagagccccctgcgtgggccaacttactgttccatcgctcacccacctcgcgtccacagagagccctcccacactgcctggcctccctggccaccaaggcgctgccagaagacaaggtcaccagataatctgtcctcagagagggctgagaacccacccggggcagtatggaggaaccctaaagagggagaaagcaaaatgggtgagagtccaagggagggagggagagagagtggctgcagcgggagctcagaggagggaggaggctggctgggatgcacttgtcatgggagcaggtccagggcgggcaattc

SEQ ID NO: 8386 - DNA, 418 bp, Homo sapiens
gacaagcataagtacatactggaattaaaatactctaagaagaagaatcctaatgcatgccaaataagttctaaatatgctaaaccagccttcaataaagccatatgaccaactgataacaacaatctaaatactatacaaggtaactggcgcaagatttgatggagaaaagaccttcacatcaccacctcagtccttcacaggccaggtcctcctctctctgagacagtagggctgaacccggggacaccccagagccctgtaacacgcagccagcagtctgctgagctcgttgtgcagacgacaaagggaacacagaacttgggtctcaggggctgggcaggcagatccaagcatgagcaattagatcaaaatagaagccttgtttcaaagaaaaaaattgtattcttctaagtga

SEQ ID NO: 8387 - DNA, 370 bp, Homo sapiens
ctgatggcggtagcagcgcccagtcgagcacggggcagcggctgccgggcagggtctggtgcgcgaggggctggggcggaaggtcgagagggcgaggactgtggcaaggtggggctgctgctggagccctcatttgagatcgatgacagtgacaacttacggaagcggggatcaatgatctggacacagcaggatggtaccttgtccctgtcacagcggcagatcagcgaggaggagcggggccgactccgggatgtggcagccctgaatggcatgtacagggtccggatcgaaaggcgaaccggggcacctggatggactgcaagctggtggctatgtctcactcctaagtcaatgcgtgacccccgct

SEQ ID NO: 8388 - DNA, 226 bp, Homo sapiens
tactcgaatcgttgtgattgttggctgaatgtttcaggctatatatgtaagagatagtacatacatgtcttattcttaactccaagaatgcgtactttaggtgagggtattatgaatatgattaatccaccatgtaatcatgactattttagggtcattattggcgggtatggtgtatccatagtatcctctagcttctggcaaatgatggtgactgctgtatcta

SEQ ID NO: 8389 - DNA, 274 bp, Homo sapiens
aatgatgttggattatgttgcctgagatagcaacagagggataggtggggcggtaaggaaggtgtatgatcttttcgctatggcggttaccagtaatatccaggatcctattatcgagtcactcgtctacatatgtggctgagggcaatgctgtaatgtgaaattcgactgtatggtggtaagataccatatgcctgcggtaacccttcgatatactctggaatagtactgatttggttcgtttttcaaaggtagagcttgactcgacgaaccc

SEQ ID NO: 8390 - DNA, 162 bp, Homo sapiens
gtatcgtgattgtgaacagattatggtgcaagtgttattgaagaatccaagtgaagtaagggacaggcggtgtatcactcaaaccagtgggataacacaggtaccacactacatattccttccgtaggctggatacaccatgagtcttgtcatagaacagcc

SEQ ID NO: 8391 - DNA, 194 bp, Homo sapiens
  misc_feature (1)..(194): n = A, T, C or G
atgtctgtcgtctccatacatactggggtgtacagtagatgtgatgtcagactcangatggttatgtagtataagactgtttaaacctgctgccatttgattgacttcaacagaanagtagtactcccactatcggatagtttcagtgagtgataatagctggctcggatagatgtcatggattcatcccagtc

SEQ ID NO: 8392 - DNA, 162 bp, Homo sapiens
ataaaatgaatggataagagtgtggataaactaagaaggaaggagagggtaaagagatgaagaagattagtgatggggataggggattgaaattattagaaatgaaagaggaatagaaagaaaagtgaaggtattaagattgagttgataaagtaaaaggaa

SEQ ID NO: 8393 - DNA, 258 bp, Homo sapiens
agtgttagatttaaggtatcttatgaacagaagtaaattagattgataggaaagaaatagtaatggagtttgagtaaagaaaatgaatgatgtaataaaaaaagtaaaaattgttgaaaatgtgaaaggtgagagtgttataatggggaatgtagatatagaggtaatttaatattggattagagtattagatataaaaaatgaagtgaaatgaaaattatatattaataataggtgataatggtatgtatttgttat

SEQ ID NO: 8394 - DNA, 242 bp, Homo sapiens
ggtttggacacctgggggggcccaaacacagggacaaacattgtgtgcggctgtcgcttgaagaaaagcaaaatctaccgggagggctgcgcgcagggccctcaaaaagggggggcaaaacaactttattttaatagggggtattggccggggggtgggcttactcgaggtgatcttggccccgcccccacccgggatgggccttaaatccataaatggcctggcctttttattgcggtcct

SEQ ID NO: 8395 - DNA, 386 bp, Homo sapiens
tggaggaacctcaggaaactcgcccgaggtcacagagtgggtaatggagacagcaaacatgtgccgaccacttagtgcacaccaggttcctaagggctcttcagaaccctgaaataatcctgtggagcagatgtgatatagacccgtatttcaaatgaggggatttgggctgagggtggttacgggacttgcctgaggttaactgaggtaacaagcaccagagccaggattcgaaccaaggccatcggggtcacaggcacacactaccccccttcctctgctggctctgacaactcaaaccgggctgcagcatgggtgtgctctttccaccaagggacccctggggtggggctgtttggcctctattaccgctccttatttcttat

SEQ ID NO: 8396 - DNA, 290 bp, Homo sapiens
ggtttggcgcatggataatgagctggacctacatgatgaatagaagcagggatgatatgataaaagacgctgggcttttattgatctggggctcctttcccgggggagtccggtgagtccctttccaggtgggtttgcactcacacgagtgggcgggattatcatccacaagctggccaagcccctacctgtgggaggcttgatggcagggcaccatggctgaaatacacgcttgggggaacagatcaagaaagaaactacgcaccaaaagtgagcggggcatgcaccca

SEQ ID NO: 8397 - DNA, 162 bp, Homo sapiens
tgcatccctgaacacctgtctgggggcggggggtggtgggggagggagacctcagccgagggactctgacgagatttggtgatgtcctacgggcaggagtcattgtatgggggtgtgggaacagtgcctagaccacagggcacggcctactcagaaggtgga

SEQ ID NO: 8398 - DNA, 226 bp, Homo sapiens
gaagagccctctgctggccaaccctgttggaagaggacactggggatgggagtggcgaggtgcagggccgaccggagacaccggcagaagaagagatggagacagacacggaggccggagtgtctgcggaaaaggagggggatgacacaggtgccctgctggccgacttgatcgactgcgcccctgatgatgagaagccagcacctcccatgagacccgactccta

SEQ ID NO: 8399 - DNA, 162 bp, Homo sapiens
accaaacaaactacaaaaggactcatacgctactagccgtgagagtctctcttgctgtgttgacgatgacgagtggtggtttctgaacctgattgacattgatgaaaacggatgcatgtaccataatgcgtctacctgacatgtgggttgcgagcacataga

SEQ ID NO: 8400 - DNA, 354 bp, Homo sapiens
  misc_feature (1)..(354): n = A, C, T or G
ggaagcccgtaagtccaatatagcagatgtcagcagacccagctttgcctgcaagctgaaagaggagacccttccttgcttgtgtctagcttctggtgatcgtcagctgtcctcgggatcctgnggttcgcggcacgtcatgaccatcttggctgctggcaccgcggggcatcctcctgggtcttcacactgccttccctccgcgtgtctcaggctctaaattagccctctactaataaggatgccaatcactggattagggttcaccatattctagtacaaattcatcttatatatgattacatactgcaaagatcctatttacaaataaagattaattaataggtcccaagg

SEQ ID NO: 8401 - DNA, 226 bp, Homo sapiens
aaactaaaagataactcgcgagggaaaccaccaaaaccacaaccctaagggcactgatgcaacccctcaagaattgtagtgggaacacaggtcactgccaccaattctcgttgaaacatgactcttcatcttatggaattcatatatatattctgcaaggacgaggcagcgaaatgtgggaagtgacgacactgatggggaacactgggactgaggtcacggagca

SEQ ID NO: 8402 - DNA, 386 bp, Homo sapiens
gccgcccctggcgaactccattgtcggggggcctctaccagccgcccctggcgaactccattgtcggggggcctctaccagccgcccctggcgaactccattgtcggggggcctctaccagccgcccctggcgaactccattgtcggggggcctctaccagccgcccctggcgaactccattgtcggggggcctctaccagccgcccctggcgaactccattgtcgggggggctctacgagccgcccctggcgaactccattactgggggggcgttacgagccgccccgggtgaactccattgtcgggggggccgtataaaccgtcccggtgaacttcattggtggagggcctctataaccaacccctggcataattcaaggctta

SEQ ID NO: 8403 - DNA, 354 bp, Homo sapiens
ccagaaaggcccgcacctggggaagctggcgaacgctaaccgggaggtttttcttccagacttgattccgggatgttgagatcgttattcgaaatagactaacattcgaatcgcctgtgatggaaggagtttctgcacccgtagcctggcctcatttattctgcaaatgtttattgggtccttgccctttacaagatcctgtgctgtgagcaagaacaaggctttcatgtggaaataagccggcctttggttgaccaaaccgaaactcctctgaatggaaaatcaagaaaaatttggaaaaaataataaaatgttcaatgaaatggatataaatattttcttgtttaagtaggc

SEQ ID NO: 8404 - DNA, 402 bp, Homo sapiens
acagaacgagactccgtcttaaaaacaacagcaacaacaaaaagatcttgatgcctctgatggagctgaacatttattatacagcaacagcagcaaggattgctggtgggcagactacactgtagggcacctgctcttctgtaagaatctgaaagacactattgtcagagctctgcccttttggaatgaagaaataattccccacatccaggaagggaaacaggtgttgggtgagggctctggcagcagcttttctggcacagtcgagccttgggagggtctcccggcaagggccatcatggagctgagcctgcccactgggtttcccattgtctatgaattgtacaagaagaggctgaagcccattgaagctcatgcaggtcccaggagaagaaaaaggtg

SEQ ID NO: 8405 - DNA, 450 bp, Homo sapiens
  misc_feature (1)..(450): n = A, T, C or G
gtgtctngacaccctccanaancaccaggagnagaaacagctttccttggccttcccagccaaatctccctctgcctctctcccctggtgacgacaatggctggggtcttgacttgccaagatctggaaacggagaaaggactggatctccaaacttggactgccttggactgaccctggcctgggaagtgtgggctcangactccgagctcaagtcagtctgttcccccaacccccaacccactgcatccgggtgaggaagtgggcgcgagcgccacagcgcacataggggtgttaggagcgaaagactggagacccaaggactgtggggctggggtggtgggggcactgctaccgactaaacaagtcggggcgggctggaaaaacgaagggggattcggtgatgggggaagccaagggacaagggaaaaaggaaagggcgcattcttg

SEQ ID NO: 8406 - DNA, 450 bp, Homo sapiens
ttctcttctgtaccttccctgcacagcctcctccccagcctggatccacagccaccatcccatcacttgcctgctgcaagtatcctcagcactgcgcacctctctcccagctggcagaaaccagccctggggaatccaactcctggacttctctacacctgcacacaggttggcaggagttgccagaggtcttggcacagcagcctggctggaatcacagagcaatcctcaaccttggccaggccctcactgcccacctggcaaatcctcaagtgtgaccctagtcatctttctccttttggggtgtttcagactttctccacaagtctcagacaagctcaagtcactcccacatgaaaaataaaaacgggctgggtgtggggggtcatgcctataattccaacctaataaatggtaatggaagaattcctgggaaaaaaaatcttaaat

SEQ ID NO: 8407 - DNA, 530 bp, Homo sapiens
gacaggacgagactccgtcttaaaaacaacagcaacaacaaaaagatcttgatgcctctgatggagctgaacatttattatacagcaacagcagcaaggattgctggtgggcagactacactgtagggcacctgctcttctgtaagagtctgaaggacactattgtcagagctctgcccttttggaatgaagaaataattccccagatccaggaggggaaacaggtgttggttgaggctcctggcagcagcttttctggcacagtcgagccttgggaggctctcccggaaggggccatcatggagctgagcctgcccactggtattcccattgtctatgaattgaacaggaggagcttgaagcccattgagctcatgcagttcccaagagacgaaaaagctgtgcataaagccatggaagcgtggcttgcttagggcaggggcggagcgtgaaaggcggcagccggtccctatcctgacaacaccctcccaatctgccccattcctctatgcctctcacctcaacgtgtc

SEQ ID NO: 8408 - DNA, 194 bp, Homo sapiens
ctcttcttggctgcagccaagattctgggggctggggtggcgggtggaggtggggtaggagggataggaaaggcaccgggacaggcacgcgaaggagggagccgcggaacaaactgtcggtttcagcaggcccccacgaaaccgcaagatctgcaacaacgatacacagcaagccaaccgacgcaggcagagga

SEQ ID NO: 8409 - DNA, 562 bp, Homo sapiens
ctcttcctgcattgtctgtggtgtgaccatagcagattatatttggttcctgaatgtttgtggtgctaatttctgtgtttgttccaagccgttcagtcatgccatgcgctgcctcggtagatggagtaatgtacaatgaactccatgagtctctccagggctgcctgcagcacgtcttttccaagtagcctatttggattcccatctcaaatgtcctggatgcgagcgtcagcggctccagagctcggggcgggtgaggtcccctttggggaaccctttcctggccatcgaggtcggggggctgccgtctgtgggcaggaggacccgaggggcagccaggaaaggcgatctcttcactgtgaaaagttgcccgggtgcagcgccttttccttctaccatgggaaatgcaggctgggcccttggggtgagcctgcggggctctggtgctgtccccgacccccaccaccaacagaatgcagctccagcttaaggaagcccaaacaagccacccagggagaacaaaacaccgccagcgtggattttccaaatttccctgggaaga

SEQ ID NO: 8410 - DNA, 530 bp, Homo sapiens
atttttaaacatccaaatatctgtaacatctgttataacacttgacatatgcaggtcaataaattaaactattgctttgggagaaatgtgcctgaattgttcactataagtctctgccgggagttattcattcaagtaaacaaaagatggcctatttctgaaaattaacaatgcgtagactggactgtaagtcgtgattccgtattttctcgagttactagctccatcattagcaacatgagaatgtgcaatgccaccatgttgaagtatgattaatcaacatcttttctgaaacaaagattttttttcccccattgcagaatttgatacaagaggtattctggttccttggggggctgaaaaaatctggtttacgctggttggaaccggggaattttctggggttaagctttttgctgggactaaaatcaaaactgcactgcagagcaggtgagggttcatgcgcgcgcgcccacaaacacacatatagagaattaaaaaaccatttgccatccatatgggaatattta

SEQ ID NO: 8411 - DNA, 472 bp, Homo sapiens
  misc_feature (1)..(472): n = A, C, T or G
gtggagtgtattgtagcatgagattaaggttttggcacatggggtggagtggggaccgaatgggatatctcagttttctgttgaagcctactatagacgttcctgtcatcgttcgactctctctcacgtgcgcactgccacgtgtgattagtatgtgaataccaccggtgtatgggattcaatggatatgcttgacgttagggaagagatacttatagtaatggggagtggacaggggatcttaatgatgcgagcctgccaggcgggaagcgggcagacttgcgggttcttcatgaatgcagagggtgttgggattggggggcttactgccgcgactgtctatgggaatcccatgagctggcctctactgatggaatatgctgtaaagaatgacggggtatggggatgggtanagtttgaaatttgaaaaaaaaaaaaaaaaaaaaaaaaaaaaaaaaaaaaaaaaaaagca

SEQ ID NO: 8412 - DNA, 854 bp, Homo sapiens
tcacctgtcttctaattagagcctcttactcatctgtagcacgagtcatttattttgtctagtacaaagaatatttcgaatactcatgactaaagagctcaggagttctagctaaagaagaatcttgaagcattggagttttgaaaatctgcataaagattttgaagattttttaaagattcatattataacagtataccgttggtctaatttttcttaatctactaaaaacgaaatagcacaggtcagatgtgacttgcttgctttctgctcctgtacaatccaggagtgttaatcaaaaagcaaaatttgtgacatcagttttatttccatggctactgattgtaatattacaaacatgagattactggctagttcatcatgaaggttaaagaagattcctccttggataggatctccaaaaccaacaccaaggggaatattatcagagctgcttccagcagcgtgtcctttcaaaaatgttctcattattctgagagctttgttttattttgtgagggtttttatcatttgttgttggtggttaatattttaattttatgtgcttgtttgttttatttattcctccacccccagtgacccgtgtagaaaatggttattttagatgttagaagcccctctgttaaagagccagttctgccttcgtttaattcttcttccacaaataagatttattttggaacttcagtcaaaaacatctgtactttgtaacagacaaacatctgccttcctaccagagctgctggccttgctgatgttagataaatgcattttgttctttgaagcccctcatagagaagagactgtaccataagagaagcccactcattttg

SEQ ID NO: 8413 - DNA, 594 bp, Homo sapiens
  misc_feature (1)..(594): n = A, T, C or G
tggctcctnagacttgttacctcaagtagagatgttgggtggacaaccccattcccatgccaggcattctctccactcatcaaaccacagtcttctgctctgttttctgtttgttttgttttgtttttttgagacgtagcctgggcaacagagtgagactctgtctcaataaaaacaaaacatacaactacttttgcgggatgctgtgttttactgttgtgttgttttggatctaacacgccctccagtttattcactcttagccagtttttccagccatatcttttccttgaatatgtccagacaatatttcatggatcaaaatattaacaaggataagatgaaaatgataaaaccttgtgcttttcattttcctacacagttttctgcatgtatcttgtataactacataaggtatgttagctaaaaaaaataaaagtgtgtgtttgcagggaagcggaggcgggggcgcgctggtgctgagtggagtcacagtaaggctgtagatggagcgccctgggaagggtggtttttttgggggtttgctcaccccggggaaggaggagtgagggtttgaggatgggtggaggggta

SEQ ID NO: 8414 - DNA, 162 bp, Homo sapiens
  misc_feature (1)..(162): n = A, C, T or G
ttgntggtgatctacattagaggggtaatattattattttttcattcttctgttatggaaatgtaaattattttactatgtttctttttatgagcattgtaaagattttatgaatgttattattcatgtatgtttatgtctatattgagatagtatgttggt

SEQ ID NO: 8415 - DNA, 466 bp, Homo sapiens
ggtaatatgttggatgagacttacatagaaggggtatattttgataaataccttctaccgaaatggaagagtaaatatatataacttgaaacattttatgagcattgaagacattaaatgaatgatattattcctacatgtttatcgctatcctgagatgagttgttatgggtatgttacagtagtaacacttctgaataaataattgcagcattctaccatttaggtttatagggaatagctatggagggacggacactcttgacatgaaacttataaaaggacagcgtgagagactaaaaactacaggcctttctctctcaagaacatagatagatgaactttaaacataatgcttgctaactttatcctagcgacagattaaaagcgcctttgggcctccatctttttttgttggtggggctattgttgcggttggtgtaggcagcaacccagtctccttctg

SEQ ID NO: 8416 - DNA, 226 bp, Homo sapiens
aataggcaggttatgtggcttattactggtgagcgaataatgtaaacgatgagcgaggccggggtgcaggctctgcagggctactggtgaggcacagagtacaaattgacatttcactatgtttgtgtgggcagacacttggaaggtgtctcaccgctgcacgagtgtgaaggctgtgcatagatcattctggcgtcctgtgttgagagcagcctaatgctcacgg

SEQ ID NO: 8417 - DNA, 274 bp, Homo sapiens
acatgggtgaaagaacatctatttagtgtggagcagataacagccatgttgtttgactaaacgtgaaggaaaactgcgtggaaaacagccctcaagaaaacccagtaacagcattgtggttattttcaggtccccttcctttcttttacaggatgctggagaaggcgatcctgtgttaagatgcctgcacaagatttggtggccttaaactgttttaagacttatgaaatgacaatgacagcctgttgctttggaattacgggattttaataag

SEQ ID NO: 8418 - DNA, 290 bp, Homo sapiens
ttttttttttttttttttttttttttttttttttttttttttttttttttttttttttttttttttttttttttttttttttttttttggggagggggtggttttttggggggtttagggggaaaagggggggggatttttttttaaggtttttttttgaaggggggggttattaaaaatttgaaaaggggggaaagagggtaaaaaaatggaaatttaaaatttttttaacaaatattggtggggccggggcgggggggggggggggggggccggaagtgacaggagtg

SEQ ID NO: 8419 - DNA, 162 bp, Homo sapiens
gggggaaattctgagcctgtcagtttggaattgaggtttgacttgtggaaggtggacttcttgtgtatttgctgctgctgcttcatgctggtttgtgtgggctacctggttgattatcttgcatgggtgggtgttgttggtggaatttgggatcacggggtg

SEQ ID NO: 8420 - DNA, 210 bp, Homo sapiens
attatggaaacatgaagctatttaggggtttttttcccataaaggaatggaaaagtaatccttttttattggaaaaagaccattattttaaaaatttattgtttttctgtgtataagaacatcagttacaaatgaaatgttatcaaattaatatcctatgcttactaagtccaccttctggtccttatttacaaaaaggggccattggcc

SEQ ID NO: 8421 - DNA, 242 bp, Homo sapiens
attatggaaacatgaagctatttaggggtttttttccccctaaagggaatggataagtaatcttttttatggaaaaagacaattatttataaaataaattgttttttgtgttatagtaacatccagtttaccaatgtaaatgtatatccaatataattatcctatgcccttatcacagctctactctctctggttcttcatacacaaatagtggctattggttatccttttgtcatctcaac

SEQ ID NO: 8422 - DNA, 194 bp, Homo sapiens
gccgggtcagggtacacctcacctaccccacctccagtcaatttcattttaagttcatacccaaactataagaatatgtaataaataaaattcagcaagttgtattttacctttaaaaatacacctatcttcccactttttgttaagttatttttaacatttttatgttatattatttcctatcagtggggaag

SEQ ID NO: 8423 - DNA, 210 bp, Homo sapiens
cgacctttataaaataacgactaaaaccttgttgtggaattatggtatatagctctaaagaaaaaattaatctgggattatatttagagttagtagagaagaataatagaaattttactttacataactataaaacatggtctattattaatataaggactaaaagctttcttggtggatcttcaacaatttaattctgcactttatata

SEQ ID NO: 8424 - DNA, 322 bp, Homo sapiens
gaggtactgtattatgggaaaacatgtaaggctatttagggggttcttttcccccctaaagggaatggaaaagttaatcctttttttatgggaaaaaagcacaatttatttaaaaaaaataaattggtttttgtgtgttataagaaacacccagcttaccaatgtaaatgtttattcaaataaataatctatgccttaggaaaggtctacctttctggttcttattaaaccaaaaagtgggcattgggtttccctttggtaacttaaccgccaggggttccatttgggaaatccacccaatcaagtatggtaggtctggcgt

SEQ ID NO: 8425 - DNA, 194 bp, Homo sapiens
tggaccggaggtaccagggtaggtagctagatgctgcttccttagcatcccacctgcagccttgacaagcttcaactatccagcagctcctatatcacaaaccgcacctacacgctggctaaggaagttagcttggctgataacaacacagacgaacgaatcaacggggagaaaccgatccatggagctaggtc

SEQ ID NO: 8426 - DNA, 402 bp, Homo sapiens
gtacaagctttttttttttttttttttttttttttttttctttttttttttttttttttttttttttttttttttttttttttttttttttttttaaaaaaaaacaaaaaacaaaggaaattaatggggggaaggggaaaaacggggaaaaaggggggaaaaaagggggaaaaaaaaggaaaaaaaaaaaaaacaaaaaatcgcgggggggaccaaagggggagggggggggaaaaaaaaaaaacggaaaaaaaaccaaaaccaaaaaaaccgggaaaaaaaaaaaaaaagcctccctctttcaaaaaaaaggggggggacggggcggggggaaaaaaaaacaaaaaaataaggggggcccgggaaatatcaaagggaaaaatcccacaacaaaacaaaccc

SEQ ID NO: 8427 - DNA, 450 bp, Homo sapiens
agctttttttttttttttttttttttttttttgtctttttttttttttttttttttttttttttttttttttttttttttaaatcaattaaagaattatgaaatttatttgggtacagggaataaccggggcaaaatggtgggaaaagttggtaaaacaagtttacattaaatttacttacaattacggtggggtacatttttggaaggggtgggtttttaaaaaaactggcttaaaatcccaaccttaaatattttggaaattaaatcattagcttttctttttttttattaaggaggggggcttgttcttgggtttatttaacttttacattaatggggcacttggttatcttatgggataattctttttctcatttaagcctccccacaaccttggaaagggattaccccatttttatggggggagaaacaggcttagaaggggaaa

SEQ ID NO: 8428 - DNA, 194 bp, Homo sapiens
ggcagaacgatctgcactctttgtttaggcatgttggcttgacaattaataactttcatctgacttttataaggaaacggacatgcttggaggctgaggatgcttaatggaatgataacaacacagacgtgggtatatttgatgtgacagtgattgacatattcagtctgtacgagatctgatgattgaatgag

SEQ ID NO: 8429 - DNA, 354 bp, Homo sapiens
  misc_feature (1)..(354): n = A, T, C or G
tctgactatggaaacatgaagatatttacgggtgtatgccactaagaggagaggaaagaaatattttttataggaacaataccataatcaaaaaaaaaaattgtttattgtgtataaaacacaagccacaacgaaatgacatgaaaaaatatttatgattangaaagggaatgttttgggtttataaacaaaagtggcattggtttactttgtaagtaacgaaggggttcatttggaatgcagcgataatgatggagtatggtttaccatatttttttaggtaaaaaaaaaatgctctggggcatataatggttatttttaacggggaaaggggggtagttattaattttttta

SEQ ID NO: 8430 - DNA, 226 bp, Homo sapiens
ttacatatgttgttagcataagacactggcgatgtaactgctctaaacaaaacaccgaaagttgtcctatgcaatatatattattatatacatatatatatttacataaaatactaaaaaagtgaaagccaataataacattggataaaagtaatacatatctgctaagtgacaatatcaaaaaaatcaaggaataattttacaataatataaataaaaagaatgt

SEQ ID NO: 8431 - DNA, 498 bp, Homo sapiens
ccccccccttttttttttttttttttttttttttttaaaaaaaaaaaaaaatcatgagaaatatttggggacagagaaaaacagggacaaaaagtggagaaaagaggtgaaaaaaaatttacataaaatatacaaaaaaatacgtgtggggacatatttgtaagggagggggttttaaaaaaaacgggtaaaaaaacaaaacttaaatattttgcaaaaaaaaaaattttctttttttttttttaaaaaaggggggggagtattttttgggttaaaataaatataaaataaaagtggaacttgagtattttatggaaaaattttctatttcttttatacctcacaccacccttgggaagggttatacccattttttgggggaaaaaacaggggtaaaagagggaagggggatattttgtgcgcgcaaacgctttatggggggaagatttggtaattgaacctataattggggcttctttttaaatataaaatattttg

SEQ ID NO: 8432 - DNA, 178 bp, Homo sapiens
gctcactgtagctacagcatagcagaccagtagagccagagaccctccattcaacacataatgggaaccttcctccttataaaggcggcaggcgccaccttcaagaagcgaaaaacctaacgcgacgcaaaagttatcacactaaacaggacaacctcccgactccactttgcccact

SEQ ID NO: 8433 - DNA, 306 bp, Homo sapiens
actgattgtggcaagcatgagctatattaggggacttgtcaaatagaggagtggaatgtggtaaaaatgatggaaaaagacaagtgcataaaaaggaaaatggcgtgtgtgtgtagaacaccagatacaatgaaacgtcatgcataaatatctatgcttagaaagcatacctcatggtcatatgaacaaaagaggcattggtgtaactttgagaagaacgcgggggctgatctggaacacgagaatcatgagggggacaggaaacccatcttgactatggggaatgaacatagctgagacggagcc

SEQ ID NO: 8434 - DNA, 194 bp, Homo sapiens
cggagtatggagaaatgaagctatgtatgtgattgatcccctaaaagaatggaaagttatctttagtatggaacaacacaattatatgagaaagaaaattgtagtctgtgtcttcaataccattatagatgtagagatgcgtatcaatagaatattgtatgcgttagaagagaaatacctacattggaccttat

SEQ ID NO: 8435 - DNA, 514 bp, Homo sapiens
gcacgattgtacatgcgtggcgccaatcaacaatatataacacgaccgaaaattattgttgcatgatgcatgtttgtgtggttgctcacactgcaaaggactgtataataggggatgaaacggtgctgcggtgacatgatgatggatcgtggtgatatgcatgattgacgagctgacactaaccatagaagatgtggtgatggattaatatgataagtcacagacaaagatgcaggacgtggtgcccgacaatgccagctatgacagcgcgctcatgacgtgtcatatcaagggtgatgacagtgatagccagagggatgctggatagcagatggaggcagggacaattggtgaataggagtggagagagcatagcagtaggagaactggagaagctgcggtgtgtctctgagtgcagctggaacttggacaagagattaggcgtgaggtgaacatcataccacctgcccccgccagacgtgacaatgataagccacaatgcgtatgctctcca

SEQ ID NO: 8436 - DNA, 322 bp, Homo sapiens
acaagcttttttttttttttttttttttttttttttggttttaaagtttaataatgaaaacacatggaataaagggggtaatccatgtattggaaacagcagaaaaaggaggaaaggggaccatccccataggggacactaatctttggggtaaactaaaataaataagggaaataacacttaatacaataataaagaaaaaaaaaaaaattacattaaaaaaaaaaacaggaacgggggaaaggagcccgggattgggaggaaaggcggtgcatggaaaagaactcaggttcaggggaccttcctggaaacattctggtgt

SEQ ID NO: 8437 - DNA, 354 bp, Homo sapiens
caagcttttttttttttttttttttttttttttgggtttaataataaaaacacttggaattaacggggtaatccaggtattggcaacagcaaaaaaaaaaggaaaggggaccatcccaaaaggggacacttatccttgggctaaattaatataaataagggaaataacacctaataaaataatacagcaaataaaaaaaattacattaaaaaaaaaaacaggaacggcggaaaggagtccggagtatgggggaaaggcgggtaagggaaaagcatccaggctcaggggaccttccctgaaaacttccgggttctgagcagctcaactcagtcccaggcataacacgtaccccgg

SEQ ID NO: 8438 - DNA, 258 bp, Homo sapiens
acctcaaactcagagtttcttcccttctttgattttctggaggacctgcagctggccttcctgagacaggctccattcctgttccatttgccttcccggcagccttccctttagtgggtataggttttgacgttctgagttactttgtatcaaagagctaattaaaaatggtccttcaaaaacataaagaaaaacagcttgaaaaatgtacctgcccgggcgggggggggaggggggggggagaaggggggggggggc

SEQ ID NO: 8439 - DNA, 290 bp, Homo sapiens
  misc_feature (1)..(290): n = A, T, C or G
tgtggtcaggcttatgaatatgctcangtttaatgagatgctctgttgtaatgtgataggctgtggaaacaacaatgagtggaatgacatcaatgatgccaatgaaattgagcatgtcaactagcgcatgaaaaatgggcatgatcatcaaagatggtgtgacggtccataagcgtgcgacgggccatacaaggactttgtgccggaagaacggcttggacatggggataggtaagcagatgggcatatgtgaggggaacggtatcttggctgctgacatcgcgatcgct

SEQ ID NO: 8440 - DNA, 434 bp, Homo sapiens
  misc_feature (1)..(434): n = A, C, T or G
ggtcggccngggtcaagcctgcgtatcagaatctgagacagcgtgttggcaactttgttgcaaatcacttggcaactcacacatggagtccgcatctcaataagaaccagctaagaaacaacattaaacaacaagtcctcaaatcaggaatgttggagtctggtattgaccgaattatttctcaggttgtggacccaaagatcaaccacacattcagacctcaagtagagaaagctgtgcatgagtttttggccacgctaaatcacaaagaagaaagaagtggcaacacagctcccgatgatgagaaaacagacacttcccttattacacaaggtgttcctactcctgggcccagtgctaatgtaaccaatgatgccatgtcgatattggaaaccataacttctcttaaccaagaaaacaaggctgctaaggct

SEQ ID NO: 8441 - DNA, 450 bp, Homo sapiens
gacgggctccacaaacaatcacggtgtggcacactcaaactcacctacgcagaacctaaagcggtgtgtgaatttgaacgcggacatatgtcatattagaatgaaatataggcattctgaaaaattgtatttctatgtgtagagatgaaggaaggatgggtataggcttagcttgatactgcaaatataaaccagggatggggtgtaggaattgtaaaaacaggtatgatctgattattgtaattcataacattaggagagagataacggactaatattgcttcaacagataaaccaaagaaagaaggagtgccataacatatactctgcacacaatgggacctacagcttattaaactgattttctttgtgctatatctgctaaatatttgttgataaatgtccacttgttggtctcccatactgtacgaatgaaacctcaatttacag

SEQ ID NO: 8442 - DNA, 210 bp, Homo sapiens
ggacgtgtacttgagaaaagaagagtaataatgaatataacttaatcaataaaaaaaacaaggtatttaaaaaaagaaaggaattaagagaaaatctgaatagatgtatgcaagtgtaagcttaataatgattagagtattatttggataactaaataataatgaatgaagcagagactgaataataaaataattaggagtagactaagg

SEQ ID NO: 8443 - DNA, 434 bp, Homo sapiens
  misc_feature (1)..(434): n = A, C, T or G
gtaccggcctgaagataaaatgaatgaaataatgaataggcatatcaaatgatatatagtaatatacgtgggagcaactagcaatgctgataaccttgaatgatgacaaaacaaaattggtaaaatagaagaataaattaccaatacaatatactagacattgttaaaccacaatggtatagtgaatgcaagaattatgagtgaaacacacagtgaatagagaagcgagatacgacatatgaaaagacagtgtaattctgatggtnggtaatggtgggtgggataagactctatgatcacatagctgacaaggcgataataaatgatcaaaaaacatatggttggagaccatgcgctggggactttttctgtaggatatgggagtggacaatctaggtcgccaccgcgctaatcactaatgtattcgcggccgc

SEQ ID NO: 8444 - DNA, 162 bp, Homo sapiens
acgtgtacttgaaaaaagaagattataaataagtataacttaattattaaaaaatacaagggattaaatgaaagagagtagaaaggaaaaattggaatagatgtagacaagattgatgttaataattgattagagtattatttgtatagaaaattataatga

SEQ ID NO: 8445 - DNA, 226 bp, Homo sapiens
gacgtgcacacctgaataaattgtatgctatactaacttgccaagattaccacaacattaaaaacatatgtatacattaatgttctggcagtggactatgagaaaaaaactgaaatgaatacagtgatgcatgtagaacatgtcatgtgcaaactggagtggatgttgaggacggagcaatgagaatctgaaaactcacagggatgaaaaaaataaacgatactta

SEQ ID NO: 8446 - DNA, 242 bp, Homo sapiens
gagtgcacaacaaaaaagaagtgtataaaaaaatattgcatgatttattaaaaataaaaaatattagaaaaaaaaaagaattaaataagaatttgataaaataaatacaagaatacttagacatatgataaaaatatgattgttctactacattctaattaagaaaggagattgagagataaataaagaattaagagtagtgaaagagtaatgagtaagagtatgaaatagggatgtaatga

SEQ ID NO: 8447 - DNA, 162 bp, Homo sapiens
  misc_feature (1)..(162): n = A, C, T or G
aagtaccaatgtgctgggaggacccaataattgatgcaggggtgtggggtgttacactgtgactaaaaaaaccacataacatcataactggaacatcactatgttgggatctgtatctacagatcacataaggaagggaagtcgtggaganaagcatggggt

SEQ ID NO: 8448 - DNA, 194 bp, Homo sapiens
caggttaaaaaaaaaaaaaaaaaaaaaaaaaaaaaaaaaaaaaaagcttgtacaagcttttttttttttttttttttttttcccagtattcataaaataaattttttagattggcctataaaaaaaaacatccaaccacctttccctaggaaccttttgaacaccataagaacaaaagctctaacatataccta

SEQ ID NO: 8449 - DNA, 513 bp, Homo sapiens
  misc_feature (1)..(513): n = A, C, T or G
gggtaccaaatacaccgacaaaagaaaaaaagcagatgggctgctaggtttctgcttttaaaaaatttcatataagaattgggtttcaagcaggaagccagaacttctgcctctggttcttaaattaacattcggtgtgtaatggacaataggcagggactcataatttgactaactcacatgctcaagcatgatcgtgtccaatttctacaggcctcctttgtaaagaaatgtgtaacaatggggggaaagtcataattctacctgaaaacatggattgtaagaagaaataaaaaaatcaaacagtatgttttaagtttcccttttgatactgtgtttcagggtaagtgacagcttctgcaaaccaagactcagtcctgattataaaggatttttaaaattacattattaaaaatatgtatttattcttctttcactttatctattttccaaagcctctttcaagtaaactgtgaagtgcctgagtacctgcccgggcgggngtggtgggtg

SEQ ID NO: 8450 - DNA, 638 bp, Homo sapiens
  misc_feature (1)..(638): n = A, C, T or G
actagaaaagcctggctgccatccatcgctgcctctgaggtggaggaagaggcgggtgatgtgctcacttctgatcaacatgtgttgcctcctctcagccaacttctatctcactgcactcactctggtcatgataaatgttcgtcacctttctgcttcattccttanggcctaaatcangaagctgttttatcgatggtttccttttgggtcagtaaccagctttggataatttcctctgattattcaagtcgtgggacaggtaaactacattcagcangaacttttctncgagagtgttatgtcatggaaaagacaccaaacacagcaagtattgtaatgaatacaccatcccaggggtcagtaagctctgcctgccaagaagacacagtgaggagggtccacagtcctgatgangtggcgtttggtaacttgtagaccctagcatggccaggtctggtcacccttaagaacttctcagagaaactaggaatcttcagtgaaagaactaatgttctcctcagctgaaattcccttgcttgtcagcatttctgcaaagctcacacttgtttcaccatacctcccttggatgtgacatgtangtangaagtatgtgcangtgggagtcatttgttagg

SEQ ID NO: 8451 - DNA, 162 bp, Homo sapiens
tacatgtcacaccaccgccatgttttgttgattgaatcggcttgggtatgcggcctccgctgactgcattggacattgatctcggggagacgtgaagaggatgtaagggtggctatgatcgctaatagcaccgagtgcctccttctgtgaggtgactgagac

SEQ ID NO: 8452 - DNA, 386 bp, Homo sapiens
gtgcatgctatcaatgtgtccaattcccacatcctgagctacgcactggaagacatgcctaagaaaatagacgaaatacaggtacttcttgatgacagacgaagcataagataacatatcatagtatagatgaagcaaatataacgactaaactaatcttacataacaatgcattacattatttgacacacatggtcatgatgtgattaagataagatagacaaatatgaagattaaatgacataatgggtgtgaaagaacgaagtgaattgatacacacactatggtaatatctgtatgatatacactaatactactgatcatacaactaaaacaaaaaacaaagaatatctagttcctgcttgtcaagcatgtgataactaatg

SEQ ID NO: 8453 - DNA, 162 bp, Homo sapiens
tgcgtcatgcttctcagtttcttctggtaactaatgaccaagatgaccaatacattgtcaacaatgccatgatataagataaggtagtagaatggattatttgatatttattttgtaaatgtgcatctttttcaactcaattttatatttctttatgatttt

SEQ ID NO: 8454 - DNA, 194 bp, Homo sapiens
ttacaacttataagaaaaagtaaagggaaacctcaacatgcatgcaactgccttgtgtgaccagtgtaagtaccccccacgagctatggaggataatttagccccggaagcgttatgcttttcattattcaactgttctccccagggtgttgcttggtcaaaattaaattatttccatccatagccaagatttg

SEQ ID NO: 8455 - DNA, 178 bp, Homo sapiens
tttgatttggttaagacttgatgatatggatggaacctcactcttaaatgcgtgatagacacacactctatgcaaactgggaagtttgacagaaagtctgggtagggaaacacacatacaggccttggtcatctggctagcagaactatcctgtgttgagacaaattgcccgtgcgct

SEQ ID NO: 8456 - DNA, 226 bp, Homo sapiens
gccgatgtacgaaggaagccaatactacatgaggtgtaataatgcatacctataactgcactcacctctatgtaattgctcacatgccgaccaaggtgacaattttcttcactgctgacacttctgagtgatgatatcaacgaatgaacacgctgccactctctgacaagacaactacgaatatcattatatataagaatagggaggggctctgcttactaaagac

SEQ ID NO: 8457 - DNA, 482 bp, Homo sapiens
gaggactgtgtaacatgtgtcactgggcaagctgtgcctataatactggtgatgctgtgagagtatgtgtttggtggacttgcagtggttgtgatttgtaagagttacttttattttttgtaacattttcttatgatcatgtctgtgttgggttgatagtgaaggatataatgacttgttggttgtattgtagatattgtgacatcagacgggatcacgctaatcacttttgtattttcgggcgggtgtaagtctagcatatgggagagctacataagcgttggattcatacgttgaactattctataatgtctgctattataggttggcgtgatgatggtcataagtggatactgtgtgaaattgttattggctcactattgtatactatataggaaccggaataattggtgtaaagattggggtgcctgatgagtgagttaaattgcattaattgcgttgtgctcactggctgctttcca

SEQ ID NO: 8458 - DNA, 226 bp, Homo sapiens
taggcatttctgacattttataaacctacatttaaggggaatttttaaaggaaatgttttttcttttttttgttttttgagggggcaaggagggaccagaaagttagctcttcttatgtggaatattatcataaaattaccttagtaaatgccatgtttataatctaatctttcaaagtattgaattgatgtctgcaatgcccatcctttcttcttaggaattgga

SEQ ID NO: 8459 - DNA, 162 bp, Homo sapiens
aggtgtcacatgtagagctagtcatattaatatacctgaatgttatgtattcatgctaattaatataatttgcaccaacaaaaacgtcaaacaacatatgtgtttgggaggtctttatgtaactctgtatataaaatacaatgcacgtttttcccgttgttt

SEQ ID NO: 8460 - DNA, 674 bp, Homo sapiens
  misc_feature (1)..(674): n = A, C, T or G
ccatgaagtctgtcttttgtcaaagttctatgcagtcccaggatagcgtgatagcagtggttaaacacaaccagctagttatagctttcattgtatggaaagacctctctggtctggaactctgcctttgaaattatccacgtagttcagaaggcaaatacttgttaaagggatcccaaaaggtaggagacaagtagtttttgttatgcattagggcagactttcaagcacaagacacaaaattgagcagcaaatgtttgggtagtcccatctcccttcggtttatatgtgggtagtaaaataaataaaattttccttctttgtctctttcttgaaataaaatatcaggtatccaaggagagctgaggattctcaatttgctagattgctttaaaggggtcagatttagaaaattaaggaataaatgaagaacaattttactggagtaggtgtggtcaatangccctttttcattttgtgccattgcttttagcacaaggatgtcaaaaatatcacatagaatgtcatctctgatggactgacagagacctcctgttgtgctgtgttaggacatgaggcttatcccagcttggcgggagagaatgctaagcatgatgagtgagatctgccacaggcacggatattttctgctcctcttctgtttgtttcaaaca

SEQ ID NO: 8461 - DNA, 338 bp, Homo sapiens
atcaccatcagggtaaatgacactcctgatgatgctgttaatagaaactgggttataacacctccccattacactcaagcacaatgtgtgtagttctctaataaggagatgaattgttcttttataccatgagagtgacatgcacggcacacacttggttaaggggtgtgcctgcatcaaaaataaaatacatagaatcagtgtaatgtgaacataaaataaagaataaatagcgtggctgtcacatgctatttccctttatggaaggtgagtgatatgtcgtgcatgctgcgttctgcacaactggcctactgggagggcactgttgctgcctggtt

SEQ ID NO: 8462 - DNA, 498 bp, Homo sapiens
gaagagcataccgatctaatagtagccagtcagggttgtccgagattgcaaatactagatctatatatcatatatctatcattatatatatgggagaatatattatgggaaatatatatcaaaaatctatatataataaagtatttagtagtaatgaatatggtgatatgaaaatatatatataatatattatgtatatatcatgatgactgatatactgagactgtcgtactctgacttatgatgcatggctatgtgagcacagggatgtgactacggggctatatatgcagggaaaataaggcagataacatgggtagtatgtctagggtagtgtgtgaatcacagaagatgaatcagtgaagagatattattgaattgatgctattcagataatgtgggtgtgaacagatgcatggcatcagaggcatgtctgatatggcatgaatgagtgaagtgaaacgtatgaagagatactgattaaagagaattcatgca

SEQ ID NO: 8463 - DNA, 290 bp, Homo sapiens
ggtaaagctatttggttcgattgttaatttagtttgctttagagagtagaacatataatgcgacaaaagattagtaatgagaaaatcagtatttcattggatgtgttaagtgtcaaaagtcactgtaatggtgttgtgttcaaccggttgtttgttttgaagaataatggtgtatgtgttacatcccattcttcatgtccaaattttggacgttccttgtctcactcagctgtgataaactggtctggagttgctgaccgaccattgttcatcgaatgaggcattatctg

SEQ ID NO: 8464 - DNA, 242 bp, Homo sapiens
ttgggtggtggaggaggtgtgggtggatggtggtgaagtgttgtgtggatatgtatggtttatagagtagatgagaatgggataaagattgtgaattatgaggatgtggagtagagtgagtataaggggtaagatgtatgaaatatataatgaatggattatgtgaggtgaaaatgatagatagggtatggtgtgaatggagaggatgtaatttataaaatgaatatggtgttttgattgta

SEQ ID NO: 8465 - DNA, 178 bp, Homo sapiens
gggccgaggtgcacatgtggaaagtaggtcatgagataaaaccatcaatatctaatatatatgaatcaagtgtgagttcacaactacaaacactaaaacacattattaaaaaagcttgtacgagcttttgctttttttttttttttgtttttcggatcacaacgcttactatacgttg

SEQ ID NO: 8466 - DNA, 402 bp, Homo sapiens
cgcgggggaggtacacttaaacactgtgagaataacagagaaagatgagggtttttatatacagtggccgctgtgtttgcggcacttgggaatgacatgtttgtttttacaccaccgtgagcgggacctggaagtagagggtgcgctgcacaaggcccaaagagaatatcattacttgctgatggtgggtcacgtgcgccgggcacacggctgtggcggagctagcgctggccgcttgccagcttcacgcatgggctccctactcctgacgcctatatgcatactgttgtgtgttgcaactgtgtctaccatacaatgctcggagggatgctgggaatgacgtggtgtggggagacatggctatgacggttgaagattgacccatctttccagggtggagcg

SEQ ID NO: 8467 - DNA, 210 bp, Homo sapiens
ttaccgatgcggccgcgccgggcgatgcacgtgatcaatcttgtactgaggccacagggttgcaccagaaattctgcttctaacacttatgtctgagtcctgtcctggagagggctgactgcacaatgattatcttttcttttacatgtggcacgtacgtgcagcatcagcaaggtggaggggggctcgcgctccacacgcccccaacaa

SEQ ID NO: 8468 - DNA, 674 bp, Homo sapiens
cggggccgacgtgcatgataaaaatttgtggaaaacatgggtcctgtatacgggggcggatcaactcctgacacgtaattcttaggatcaatatgttgggctgtgctgaggctgacaggtgatcttggggtggtccttttatggctcgtggagggtcttcatggttaggcttgcattataccatcagatcatagaagcggacacattgactcatatcctatggctagtaaataagatgtactggatagtgaatctctttggttacgcatgacgaataactggaaagaggagagtgacataaatataatgcagagccatattgtctacttgtactgcaaacttttgatgatctgtatagatgaccagagcatccaactgagtgaggagcatcatcgcggaagacatgattgtcatgtcatacgatagcagcggagcatataaagaggatattggcatgctctgcgccgagtccaggctactgactaccgtatgtgatgccgactgcaggtgcgatatgatggagagctcagctcgcgtgggatgggtaacgttcggttctatagtgtcacgtaaatagcttggcgtgatgatggtcatagctgtgttgtgtgtgagtggttatgcgctcacaaaccacacacatacgagccggagcataagtgaaaagccggggt

SEQ ID NO: 8469 - DNA, 226 bp, Homo sapiens
cgcggccgaggtaccggtgaggaaagtgcggattgacacttggatggttgtaagtatgaatcacctgatgaggtcacaaatacaatgcaatcgtcaaactatttatagcagcctctaacttgcttcatatgcttctgtttacagagtgaatacgacccatctgctgcagtgaatgtgattgagctctcaaggtctgggcaagaggggattggtgtaagtgtatcca

SEQ ID NO: 8470 - DNA, 162 bp, Homo sapiens
gggcggacgggcctgacggggaggaggtttttgggtgtgatgaagattgtggcgtgtttgcggcattggacagcctagaagctcaggacaagtgatgactctgtattggaaagtgatgacgcaaggccgggggacgcaggggcagccaacacatcagccatc

SEQ ID NO: 8471 - DNA, 226 bp, Homo sapiens
  misc_feature (1)..(226): n = A, C, T or G
nccgnctccgggtctagnttactgggacaacctgntgntggncaggnatatggcactcaccgggctgggntaaggcacagncctgggntaactcactgggcattgggcaggctatccggcatgggctatggcacagcattcctacctggccatgacctgtgcatgctaggcacagctatttgcgtggccctccgctctgctctgtgctatggccgcgcatagcgca

SEQ ID NO: 8472 - DNA, 338 bp, Homo sapiens
  misc_feature (1)..(338): n = A, C, T or G
gaaggantagcaggnaccgagaggataccagcattactgacgaacanggaccagccccacctgggaccctcttaccccacaactctcattgggctacaccactcagtcgaccgatacacactcgacacagggacgntagggatgcaatgatcagacctcctggtagtcacctaagcactatctgggactggtttggggtaggacaaaggcagcacatcttggcaactggcacaagggcctctccaagctgtaagggcagctcaacagcacctactgggatgggtcagcgcaggggctgctggtcctaggtactctggcccggggcggaacgacttact

SEQ ID NO: 8473 - DNA, 224 bp, Homo sapiens
  misc_feature (1)..(224): n = A, C, T or G
ncagntacgncctggcgnaaggntcctttctggacgntcaaggagnatgnaatctggnaaaaactgtctattctcttagnagnagnaaaatataccccacctaaagtcgcagctaccattaacaaaaaaaaaaattagcaaagggaaagaatcaatggtaaggacagtaaatatactctgagaatagagtaagtacctcggccgcgaccacgctaatcactagt

SEQ ID NO: 8474 - DNA, 770 bp, Homo sapiens
  misc_feature (1)..(770): n = A, C, T or G
gggncagntactagnaaaggnccggnctgccatccatcgctgcctcgnaggtgganaagnagcgggtgatgtgctcacttctgatcaacatgtgttgcctcctctcagccaacttctagctcactgcactcactctggtcatgataaatgttcgtcacctttctgcttcattccttagggcctaaatcaggaagctgttttatcgatggtttccttttgggtcagtaaccagctttggataatttcctctgattattcaagtcgtgggacaggtaaactacattcagcaggaacttttctcgaggagtgttatgtcatggaaaagacaccaaacacagcaagtattttaatgaatacaccatcccagggggtcagtaagctctgcctgccaagaagacacagtgagaggggtccacagtcctgatgaggtggcgtttggtaacttgtagaccctagcatggccaggtctggtcacccttaagaacttctcagagaaactaggaatcttcagtgaaagaactaatgttctcctcagctgaaattcccttgcttgtcagcatttctgcagagctcacacttgtttcaccatacctcccttggatgtgacatgtangtangaagtatgtgcangtgggagtcatctgtcagcctgctatgtttcagagatcctgaaagtggtttgaaacaaacaggagaggagcaggaaatatccgtgcctgtggcagatctcactcatcatgcttagcattctctcccgccaagctgggata

SEQ ID NO: 8475 - DNA, 226 bp, Homo sapiens
  misc_feature (1)..(226): n = A, C, T or G
acagntacgatttacagatcacggtctcaactgattttggcatcacaatataacataatttaaagtggggtgatttattcaacagtatcttgtttcgcaaactttggagacatgtcctagactgtaccttcaaactgtattcctgatcttgctggaacatgttggttgctggcggtgctggcatgcagccatggtgcattcctggtgcctgaactgatagatgtgg

SEQ ID NO: 8476 - DNA, 338 bp, Homo sapiens
  misc_feature (1)..(338): n = A, C, T or G
gnagatacgcaagnttcttttactttcactgnaagnttctgggcgcctctggtgnttttttcctntcttttctggaaccaggggcaagcactccggtctcttggcttctgcgnacggggcagnatctgagcaatgcacttgcgactattctgctcctctcctgcacaggggtaagtatcgtctctctagggtgaaggcagatctggcatttgtcgtcttcttgggactaccagaccgcgtccctttttttctctgctgcgtttcttttctcttccttatcctcttttaatctctgtccctcatacttgcttatttcatacgatgctaggttcactcct

SEQ ID NO: 8477 - DNA, 322 bp, Homo sapiens
  misc_feature (1)..(322): n = A, C, T or G
cagctgnaagctccaagncaaancaatacagnaactcatccagtgatggctgaactgtcgtcatcagctaaaacaggtaagcgaaaaagagtcagatgctgtttcgaggtttagtatatcctagtaatggttgtcctgcctgcaatatttgaattttaaatataaatctatttattaatatttaacattatttatatggggaatatattttttgactcatcaatcaaataagtatttattatagtaatcttttgtgtaatgaatatgaatatttattaatatatggattatttattatttttatatcttgtgattgttttat

SEQ ID NO: 8478 - DNA, 498 bp, Homo sapiens
cgggtacatatatcaaaggactataatataaacatgcacctatggtattatatagcaaaaagaatctatggggaacagttacttatgcacacattaacatactccctgaattttgattaacacgatgttctcatatgcatgtgatattcatctacttatttttggctggtcatagtatctgctgcatgttatcagagtttatattatcacctcgggagatacccacctaatcactggtgtattgctggcgcggtgtgagtagatcgtctgggagagctcccatcgcgttgacatgcctcggtcgtagtattctataatgtcacatgattagctggacgttctcatggatatagatgttatcctgtgtgcatatgttattagatctcaattccactcacactactatcggtatgctataatgcgtattggatgggggagttaatgagtgtatctcactatacattaattgtgttgcgctaactgactgatttacattca

SEQ ID NO: 8479 - DNA, 530 bp, Homo sapiens
  misc_feature (1)..(530): n = A, C, T or G
gncagatactgattacaacaatgccatgctctcgcagcagactcacgattcaaggtcttacatgcccgcaacatgactcacagnaactaaaacatctacactgtctaaaataagaactcaaatgtctggatgtagagactatattgagctggaaagtcaataaatctttcactataaccaccacatggcacattaatgcatcacatatcaagcgtatatagtgcctgagaactgaagaggatctgtaaacaactttcatgtgtgtaatatgactgatgtagacacgctatgcattgaagtactatctgaacagatggattacctcttgtcctagcatcatctcgactctgtcttgattatcaactgcttcccactggaaacatatgaagccgtctatttatttatgtgtgtatatgctatatgaattgttgactgtgtggaatgcttgctattgtggctattattctgaatcttaatactataaatatggatctgatatgattctgcttgtcagtctctagtgctatgca

SEQ ID NO: 8480 - DNA, 178 bp, Homo sapiens
cggccccgcccgggcatggttacataggcaccgagactgcggagtgggactctactaagtgtgtgtgcaactacatgtgcgaacgtggttttttttttacttcgtgcttgtttgacgctatggctgggagcgcatgagcacagagccatgaccgcgtgcacgccgtattcgatggcgc

SEQ ID NO: 8481 - DNA, 210 bp, Homo sapiens
cgtagtttaatatttattgtctctcttttctgctgttgtagtaccatattatatataagtaaagagatgcgttcaagatctagatcacgttctatgaggtagaggactcccttatcttgtatattcaggcggtcaagtagctatatctgagacggtcggtctatattgtatagtctatgaagtcgtgtgatgattctcaatagctctatg

SEQ ID NO: 8482 - DNA, 546 bp, Homo sapiens
  misc_feature (1)..(546): n = A, C, T or G
tggcatatgctgtattttattgtatcgtgtaagtgctagaaatatacccaatactgaaatcttattaactttgttttctatgcggcttggggttttggttgttcatgcattattgtccactattatcatttttctttaacaagatataacattgtatggtatattgtacatatattgtatgcatccattactggtgtgtgtttactactttggctgttgtgcttaacgacacatggaactgtgcaatatcgcttttatgcacaactctcggcttatttaaccaagaatattatcgtgaaacatcgtgtactggctaataaggcatattctcgtattctttgtaatgtgatatagtgatttcagatagctttaaagtgtatgtgtgacattcgtgacaactatccaacacatacttaactgtgccaatatttgtcaatttttatatctgatgcatgcgttcctaaaaaatgagatgtctctgactaacataacaggagtgtcaatttgtggtgcgtggagtgcaatgtagtagtgtcgnactcagcg

SEQ ID NO: 8483 - DNA, 338 bp, Homo sapiens
acgaggattagaaaatcactgaagtgactgttgatgacgtaggtgaagagtgggaagtagaggaggtgtggagattattatttaagtattttatgaatgctaagtaataggaagtggttgatggtgatatttaaattttgattttgttaaatttgtagtagaatattgattaatgattattttatgtggtgatattgtgatgtgctttatgttgagcaaattggatattatttattagtttgtttttgaagtgtcttactatgtgagatgagaggtatagtattgtgttgtgtgtttgttgttcatattgttgtgtattggatttagttttctttgaa

SEQ ID NO: 8484 - DNA, 177 bp, Homo sapiens
gatgcctgtgctcactgtccacgagtgcactgaggcacaagggcatgaatggatcctataaatgactcactttgcctggctcttggcactggatgtagctgttggggcttgacaatttagaacttgaagccctcacccattatccggaatattgtgatcctgactactattccagaa

SEQ ID NO: 8485 - DNA, 306 bp, Homo sapiens
aagatgtgatgaagcagaacgatgaattaatagatggaagacatataacatgcgataaaagtgatacgtgtcactatataaagagtaaagcccatacaagtatccatgctttctaatctcaacgttgtaagtggctgggcaacctatgcgacgtcttacacaaggacacaaagacatgagcatgagctataagggggctccaggactacctctaagagggataggcctctagtaactccaggctctgctccgaatgctgagaggagacttaaatactgttactgcggcccgttacatcagaactca

SEQ ID NO: 8486 - DNA, 162 bp, Homo sapiens
tcatgaatctccaaccttaaatactgaaacactgacatatgaagctatttgatgcctgcttgaatcaatatatcaccactacttgcggcactgatgacactatgcaaagttgcgtgatacgtccgaaacaatgccgtagggggggctacagggcacgaaaca

SEQ ID NO: 8487 - DNA, 162 bp, Homo sapiens
  misc_feature (1)..(162): n = A, C, T or G
tttttttttgntggtttaaaattttaataaaggggggncaaaggntgnaatggntcnaaaantcctcaagntccgnacggnactccccgnagaccaagncanttgnantccattcattattcgntctggnatcttagncaaagccccggncccctggnanca

SEQ ID NO: 8488 - DNA, 194 bp, Homo sapiens
  misc_feature (1)..(194): n = A, C, T or G
tttttttttttttttttttttttttttctaattactaccttttattctaagggaaaccagggcccgaaagncgaataacaagctggncgaaacaaaggaaactaggggtggncaaaaagaattaggggggaaaaacatggnctcttcctgggggagggagncggggaaaaggnaaaagaggtgctcagccggca

SEQ ID NO: 8489 - DNA, 210 bp, Homo sapiens
  misc_feature (1)..(210): n = A, C, T or G
tttttttttttttttttttttttatttaaaaaaatttcaataaaacggccgggcgggctcggggcggcccctatcggctcagccgggggnccctcctcccccaccccattctaccaggggagattctgggggggaggccaagttcccttctagagggggcttcacccttttcccagaaacgttccagtttcaggagnaggnagcaggcag

SEQ ID NO: 8490 - DNA, 226 bp, Homo sapiens
  misc_feature (1)..(226): n = A, C, T or G
ttttttttttttccacggntacaaaatctttaggtaantataaaataaataatagnaatattaattaataacaacaacacaacagggncaacaatattaataataacaaaanctctcccatggncccacgnccttcctccancttttctcttcggcttcacacaacttgngnanatanctgttttcatancgggnaaaacggagncccananagntcgncacactg

SEQ ID NO: 8491 - DNA, 338 bp, Homo sapiens
ccaggccaggacacacagacaccacgcacacgggaagcacggacgtgcagaccgcacctccccctctctggacccactctccccagctcgccagctcaagccaggagcacacagcgcgaccccagcccaccaccaagaggacaggacaccgagatgtggaggcggccaccgggcagacaaccgaggcgacaaaccacagaaccggctccacacgtagaagacagcacacaaacgcagccgatcccacaacagcacgcagtaccctccagccgagccacacaagctccacccgcccccccagctccacctgccgcggccccccaagactgccagccacc

SEQ ID NO: 8492 - DNA, 594 bp, Homo sapiens
  misc_feature (1)..(594): n = A, C, T or G
caactctgaatatactaaaagctgttgaattacacactttaaataagtgaattttacggtaagcaaattatatcttaagacattaaaaataataacaaaggacggaactcacacatcttctttagacagaaatgtagtctcactgcagcaagtatggcttaaacctgcttctgaaccgtgcacagttgtaggcctgtctcaagtgttccgtcgttgacttgtgtcccgcctcgccgggcaatgatgtatgtgtggagcgcagtcatgttctttgttacgcaacacagttttcaccttgggctaagatgatgtgattcttccaaggtttgtggcagaaatcccatttaatanactggtccagatttcttcatgccgtaaaattgtttaaggaagttatttattctgccaagctctcgtcatggtgtccgacactcccttctgtctcctggagggccaggcttccgtgctctggggctcagcaggacggggaggacgtatncctagacacctgcatcagtcaaggtcatggatattgggaagacagacagcagcagacccaggtctgagcttacaaggtagccactgagtctgggg

SEQ ID NO: 8493 - DNA, 434 bp, Homo sapiens
ccatttgctcactggggctacagacgcttttctacctgcaatgtagatagactggatgccactcgtccttataattgttaactttttactgttatctttaacttgtgtttaacctcactttcatacactttagaagcaactggaatgataatggttattgtgaacaaggggcaaatctgcatgtgtgcagaatataatcgagttatctttcttttactgatactgaccccacatgtgtttgacctttctatgcacactgttgcctttagaatactaactgataaatcattttactgttgcttttctctcacatgttagcttaacgctgaacggcattttgactacagtgtgttctgcatatagaacattgattacacatgatatattggtttatactttttgttgtctcttgcttatttagtttgctgctcacg

SEQ ID NO: 8494 - DNA, 386 bp, Homo sapiens
gtactctctattacatcacccatgctaatattgatgatgtatcatctctatgtaggaatcgacttgtatcacctgcattactgagtgacgcatatgagatgagatgactgctgacctgttcttgtggcaccctggacccactaaagaacgcccttagtgatgaccaactgccacatgttacacattcttgatggttggctgtgtggcggaccttctcttgtgaccatgatccagaagctcctccaacactgcttcactggaacactgctgcctcagacgataccacgtgatgaagttgtggcttatggggcagctgcacgtccgagatttttgacagctcacaactctgagaatgcatagcttgagttgcctatggaggcagctaa

SEQ ID NO: 8495 - DNA, 642 bp, Homo sapiens
ggttcaagaacctgctggtttctggatgcgtaagtcacacagcctctgctgtgtgacactattcttgcttctgcctgtcatctgtgatcatatgccaggctcgtgccagaatccctttcttatactgatgtggcgtgatggatccgcatggggctgctctcctggaccttcgtgctgtccttatacctggtttggggagcacggtgtggatgacgtgagcgtgtgatgaactgcatggagattctgcggcaatagtgacacatgtggctggtgtgcttgagatatgggatgagatatgacatgcggaactaatagcatatgctttgtcatcacgatggcaaaatcactgagagaacagagaaaaaaacatagtactgtgtcgtgatcaatctaatccatgccgtatacgtggtcgacggacaggctacaatatggatcagcacactatgagtctgatgatacggtagagcatgcaatgatgatgacgtgatgggactcggcgtagtcatggctatagctgtttcctgtgcgcagttgccttccgctcacaattatacaaaacatacgagcaggaggcataaagagtaaagcctggggtgcctaaggagtgagctaactgacattattatgggttgtgcctgc

SEQ ID NO: 8496 - DNA, 530 bp, Homo sapiens
attggtggtagctcatacatagatacttggtcatatctgactcactgcttggacttctgctatatcactgcataacatggcggtgggtggttggtgtgatgtatctcattataggagttgtgtgaaactcattacgaatggaatggatatcctgatagtaacaacatataccatcacagaccgcttattgaaagcagtactatatattaccaaacttggccttgttgtctgggatgatctggacgacatgtgggtgatagaattggttgagaacatggacaagatattcaacgtgacatataacatgataccataacaaccctacaggaacatagctttcgactgatacaggtgtgactctgactggctaggatgctctgacacactgtacgtctacatacaaccaggtgattctagtttacacaataatggactgagatgatactaactgtggatgatagcactgtatgattaaaatgatctcttaggatatttaaaatagaagatataataaaaatatataaaagctt

SEQ ID NO: 8497 - DNA, 162 bp, Homo sapiens
tcgacgtatactatgatcttcttatctgtctttcgtgtattaggtagtaaccttatgtatatgtctctgctagtcattactgctctttatacattgatatagtctgtcgctggcagggatgtaaggggctctaatgggcatgtatctagctgatgctctgac

SEQ ID NO: 8498 - DNA, 162 bp, Homo sapiens
ccaaaagactgctggagaccactcaaggcaagacatgaatgtcaagtttctcaatagcaactaaaaagaaaacgaggactgactctcgaaacagctgactaatcattcggtatactgacttgaatgcccaacgcaaagcaatacatgaaaccacccaagcga

SEQ ID NO: 8499 - DNA, 354 bp, Homo sapiens
agtctgactattaaatgaatggaaatgacacccaacatatacagtatttatatgagattctgactgtctacatggatatcatgcgcggctgggtaaaaaatatccgtggatttgcacacctgcacaaagcacaccaagaactgctttttgaatcatctctcttataactggttgcacttccatgatcatacacgtggctagcgagtggtaggttaactcatatattgcaatggggtggtcttactcatgttgtggtgcataactggattagaggaatggacctgatgaatctgttgattatggcgcaacttgccaaacatgaatcttgactggtacacgactctgatgaagtgc

SEQ ID NO: 8500 - DNA, 466 bp, Homo sapiens
ggtacacatagggcactgaacatcttacttctcgtgaggattactgagctcgctgcatgtgattcgtgtgctcacactccactgtttaatatgttactatgacacacctactaaaagtatgacagctcctcttgacctggaagtgtgcaattaccatcacacgtggataatgcaaggcgctgctctcatttcctgttacttatgactgtgacgtgaagtgagattatgcactattaacaaatcatgatggtggagatgaaagtgctcatcattacatacaatgtgattgatacacagatgtgtgacggattgctgggataaaaatatatgtaagattaggactcctaaccgctggtttactcaatcataaacagaacaatgatcaaaacagaggtcacaatactgcctgaggtggctggcatctctacgacgcacgagtgcactgtacaccatgcctgcaaacgga

SEQ ID NO: 8501 - DNA, 178 bp, Homo sapiens
  misc_feature (1)..(178): n = A, C, T or G
ccngggtacatcccattgatgtcacttcgcaagagtgggcatgaccatattgtgaatctatgagtacggactattgaggactaaactggaaggatgcaactacacacactgtgaggaatggctgcgtctcacactagtatgctttattacagggactggacactggatagaanataca

SEQ ID NO: 8502 - DNA, 594 bp, Homo sapiens
  misc_feature (1)..(594): n = A, C, T and G
cgaggtacaggtcacacagcacatcagtggctacatgtgagctcagacctgggtctgctgctgtctgtcttcccaatatccatgaccttgactgatgcaggtgtctagggatacgtccatccccgtcctgctggagcccagagcacggaagcctggccctccgaggagacagaagggagtgtcggacaccatgacgagagcttgaaatctggaccagtttattaaatgggatttctgccacaaaccttggaagaatcacatcatcttagcccaagggtgaaaactgtgttgcgtaacaaagaacatgactgcgctccacacatacatcattgcccggcgaggcgggacacaagtcaacgacggaacacttgagacaggcctacaactgtgcacggttcagaagcangtttaagccatacttgctgcagtgagactacatttctgtctaaagaagatgtgagtcctaagcagacttaaagccaagaaaataagaagaggaaagagagaggcctgccctaacccactgttgtgctgacttggacaattccaagtccaagaggactgtctactttcgaccttgtgtgattataacct

SEQ ID NO: 8503 - DNA, 178 bp, Homo sapiens
aggtaaatatcattgatgtgagtttcatactacagcatggatgtggtagtgctgcagactggtgctgcttatggggcagatacactagctctgatgtcaatgactggaacagtgtgattggatgcctgatggatgatttcttagacatgctaaagtgtaagtcagaccctgactcagt

SEQ ID NO: 8504 - DNA, 258 bp, Homo sapiens
ggggcaggtaacacctccagacctctttctgtctgagtgtatctagtttgctgcttttatttatgtattatgttctcctcatgtacttgctccttgctgctgggagaattctgtcgttctctttggccgatctcaaatcgtagaaccctaaactacttcctgcagtaactgccctggcttggcgtctcacaaggcaatactctcctcgttccagcgaggaccagagggtagcccagcctcccagtgtagctggactcc

SEQ ID NO: 8505 - DNA, 210 bp, Homo sapiens
aggtactggacctaacctaatgtagcacatggggacacatcgatattacaacaaagtctattagacgaccacgaaatacataagcacatataatgctgattgtaaatagatatccaaagcacctctgctacaaactacctggctcgtgtctgctgtatcttgccatccacatgatagggcatgtaacacgaactccagagcaatctcctc

SEQ ID NO: 8506 - DNA, 321 bp, Homo sapiens
gtacttgtgtgtctacagtcacggttgactatcccactatgtttactataaatgaggctctgtgattcactgcatggcagcaggtgatggcattgacataggccactgcttgatatgattttgtgcatcctgtccagaggtcctggactttatgagaggtatgtttaggcatttggttgacatgctatctgtctacccgtgtccttacgtctgggatcacatattccttctgtgggtacaaattgtgtgtgatttctgatgatagggggtggtgtataactatttatcttaacactggttgtatatattacattggtttaa

SEQ ID NO: 8507 - DNA, 290 bp, Homo sapiens
  misc_feature (1)..(290): n = A, C, T and G
cgggcaggtacactcangaatgtgctgcacaaactctattcagttagcagtgatcaccccgtgacccacacacaccttcgatataatcctacaaagtcttaacattaattaacataattaaataagtatttgcatctataaaaaatatacagaagaactaattgtggagtaatctgtgcctccatttcaatgtctgcttgtttcactgacattatcaatatattcttttcatacaaagtcttataaaaagcgaaggagggctgagcggatacgaccagccacacacaaaa

SEQ ID NO: 8508 - DNA, 371 bp, Homo sapiens
  misc_feature (1)..(371): n = A, C, T or G
cagntacaancttttttttttttttttttttttttttggtttggaacctttaataaaaataaaaaaggaatgcaaaaagaacacaatgttgaaaacttaatattaatgtgaacctcactagatgttcaaatctggtagagtgcaaattttgttcatactattttacatttttacaaactcaaatcactttggttcatatattttctataaactattggcaaaaaaatcctcaaatttacattcttttggctacattatttctaacagatatagatttacttccggtttcggagagaaagacttattgtgtgtgcgtgatcaagtctgttttaaagattcacacctcggccgcgaccacgctaatcactagt

SEQ ID NO: 8509 - DNA, 194 bp, Homo sapiens
  misc_feature (1)..(194): n = A, C, T or G
ttactaatttacttagcaaactttatcctgagatttgcaaatttaaaaaaatgaagaatcaaactatattttcttttctgtttttttgaaacagagtctccactctgtcatccaggctggagtacctgcccgggcggggtgttgtngtggttatgaatttgtgtgggtgtgaagtagagattagagataggatg

SEQ ID NO: 8510 - DNA, 162 bp, Homo sapiens
tttctgtgtaataagagtgactgcttataaggagcgtggattgcgatagagtattgtgaataaggttgtttctacttaagtagatttgtgtataggcaagagtgatgtatctttgttatagtttaggtgtatgtagttattgataatagtgcagcgttttta

SEQ ID NO: 8511 - DNA, 274 bp, Homo sapiens
  misc_feature (1)..(274): n = A, C, T or G
agcaaaacccacccaagcaacaactggggccaagaacggggnaacccaaataggcattaccccagaggaaccgaattaaggaaaatggaattaagggggtggcccaggattttgacgaccaatttgatgatgaaggaccccttccttgccttagggactggcaaacttttttaccatttggaaggtaaaattgaaggaccaatttcggtagtggaaggaaaacattggtttgtattaaaggaaaacaaaggcaatggttgacccgctttcgggg

SEQ ID NO: 8512 - DNA, 162 bp, Homo sapiens
cttgatgattgtactgtatgtgtccgtagagctgatggctgctgtgttctatggacgttggtggacgactgtctgtagatgaggaggagatgaacagtgtggggcaggtttggaacatcttgatgaatctttgcacgctcatgtattgaaatcttagcatca

SEQ ID NO: 8513 - DNA, 338 bp, Homo sapiens
tgtataatggccctggaccatcttccatgctggataggacttataagtgtgtaatacacacgtactatgggcaagatggataaagactactgcctacataacttgtatctatatccatcacatcaaccaatgataagtacgaatctatcctaattttacaaacatggacacataacaacaaagatgtcaatgtcctcattcaacagaactgaagatagatcaaacgctaaaccagactctgtctctattccctcctgttgtgccacggtgcatctctgccgagacggtgcctttatttagttacaaaacacacttgatgtatggcctacgcgtttaac

SEQ ID NO: 8514 - DNA, 322 bp, Homo sapiens
  misc_feature (1)..(322): n = A, C, T or G
ctggtccaacagctgagggatgttgagggaatactgtactgccactcaccgaattaacgcctgcaactatcagagatgaacaacataaaaaaaaacaagaagagaaaaaaacatagttagagaacctctgcatgaatcatgataagcacatatagaagaaaaaagatataaacgtggtagcgtcaatccgagagacgacatcgccatgcggtattgccagcaaacacatatggactggacagcnagacatggatcataatgatgaatgatcatgcgctactagactactgatcaatgggtggacatagcagcanacactcac

SEQ ID NO: 8515 - DNA, 786 bp, Homo sapiens
  misc_feature (1)..(786): n = A, C, T or G
ttttttttttttttttttttttttttttagtttaaagactatttcagttttagtcagactacttcagacctcagactccagacttcagactccagactttagacaacagactccacatgccacacaacagactttcagactccagcttcagactccagactccagatcgcacacttcagacaacagactctagacaacacactccagtctccacattccacacgacagactacagactccacactccagacaacagactccacactccagacaagagactccacaatccagacaagagactccacactccagacaagagactccacactccagacaacaggagacttttagactccagatcagacttcgaacttcagattcactccagacttcagactccagaccagacttcagactccagacccagatttcagattttagacttcagactccagaccagatttcatatttcagactccagaccagacttctgacttcagacttcagactcctgacccctggcaacatgcacatggcangcccttcacttagctggtagaaggaacacaggcttgggaaggagatgtctgatgttcactccctgacgacactcttacttgcttcaatgatctctctgagccttgggtggcccatctgctaaacaaggatgagttatttgctggggatgctaggagacttctgcctcatgcctgcagtgctgctcatgttgcccccttggaattacttgttcaacttctttctttcccactagacggggactttttt

SEQ ID NO: 8516 - DNA, 338 bp, Homo sapiens
cgagtactcttagtagcgcacgtctttgttgtatgcctttgatgggggctgctgaacgtctttttcaaggatcatggatgtctcatggaggaattaaatctcatgggtattgattcattgcttcacggggctgaagaataatctgtgggtgatgtcctgattgatgctgatatgacacatctttgaggtaagaacttgtttatgtccttgaactggatgggattgttctttgtgacctcatgagtatatacatgatgattcagctgtagacatgtgtgacatctcttatggttaacatggaggtggacattatacctgatggggcgaacagctacttt

SEQ ID NO: 8517 - DNA, 274 bp, Homo sapiens
tgaggacttgatagcatgtgtgtgtggactgaaatgcttatctcttccggagatgtgacgaaacgcctggtgtgtgtttgtgtttgggctgagactgtatagagctggtagtttgtagcatgtgagagattggagtgagtctgtgtggcttaactcctttctcgttcgtctgcgcataccggcatttagtctcgtgggttgattatggaacttgcatgtgaggctggatattgatgagctgtgtgtagtgcggctgatgcttaatatagagtct

SEQ ID NO: 8518 - DNA, 610 bp, Homo sapiens
gaagaagtcctggcaaaaatcagctccacatccacagatcggctcacagttctcaagaccaagccacagtctatacaaagggatatcattactgtctgcaacgacccttacacgttggcccagcagctgactcatatagagctggagaggctcaattatattgggccagaagaatttgttcaggcgttcgtgcagaaggaccctttggataatgacaagagttgctacagtgaacggaagaaaacacgaaacttagaagcttacgtggagtggtttaatcgcctcagctacttggttgctacagaaatctgtatgcctgttaagaaaaaacaccgagcaagaatgattgagtatttcattgacgtagctcgggagtgttttaacattggcaacttcaactccttgatggcgataatctctggtatgaatatgagcccagtctctcgactaaaaaaaacttgggccaaagtgaagactgcaaaatttgacattcttgaacatcagatgggacctttcagccaatttctataattattgaacagcttttcgtggggccagcacaaagtctttaactgctcatagtagttaagaaaagatggggatacatttc

SEQ ID NO: 8519 - DNA, 162 bp, Homo sapiens
taccaacaactcttggtaaagatcacctccgcatgcacagagtgcttgacatgtgctggatatcacgcttgtcgctatacgaagggatgtgattactgtctgtaacgacccttactcgttgtgtcaataattgactcatctagacgtggataggctgattca

SEQ ID NO: 8520 - DNA, 466 bp, Homo sapiens
  misc_feature (1)..(466): n = A, C, T or G
gtacttgataagttgattctaaaatacatatgaaagtataaaggaacaagaatagccaaaaacttttgcagaaaaacaaattangaagacttgctttaccaaatatcgagatatgtgtttataggtaattcactgagctgacattaatgtgttgtgtatttttttggtcagagttgatccttactngagagtgggtatgcatgagtgtgtgtatgtgagagtgagtgtgtgtgtgtgtgtgtaaaatggaggagaggactaaaagtgtgactagaagcagctggaagtagcanngagagtggaagttagtcccctcgagtgtttgcaaagtaagacatgcctgcccagcactcttcctagtgtatagtggctacaaatagagtagagaacagactccagtcctcaaagactttcagtcttgcgagtcaactcagactcaaatgtagaactgggaaggacagtgccg

SEQ ID NO: 8521 - DNA, 210 bp, Homo sapiens
atgcacagtgcacatatctggtacaagctaaatctggggcgcatcacagccaatggtaaattctacagtcccttctcttacggatcataatgccttgattgtaagcgctgcacatacctcagggtcgccatctactgtagataaaaaacaactgtggatgactataacgccatgtgcagtctcatggggtagaggcttcactcgtttaac

SEQ ID NO: 8522 - DNA, 514 bp, Homo sapiens
tgcacattagtacatttttcttaatggtgtaatacttgcgtgtagctgaaccaatcatggatactaccatatcataaaagaacatgactatatctccgtctatcatccattaaactattacctttcacagctaaggccttgacctatgcctgaatgatgctgttacataagctgagataatacagccatttctgtgtcatccatcaggataaacagtatccacgttctacgagctgtgtagcgtgcaaccaatgccaggagtacatactgtatgctgtggtcggagcttctgctaaccactctatcatgtggaagatggataatagcttatgggggaagccagacaagattgataaaaccactataggtgcattgacatgtctagctatgtggtgaggaatgtgactatacatcgtgtgatgatagttgggaagtatgcgctcaatataggccatctgctggtctgacagaatctcagacgtgaccacgctacgtaccagccacggccggccgg

SEQ ID NO: 8523 - DNA, 322 bp, Homo sapiens
acttgatacaggctctgacaccagatgacctgtagagtggccacagaaggtgggcaacacactaatagggtacggtggaaaaacatatggcggagagagtgacatgatgatgatttcatttaggaagatgactacaaatctatcataattgtacaatgtacgtactcctagcatatcgcgtatatgaccgtcgatcatttcaacagaaatgaaagcatggatgtcacgctacactgagcgtaatgtatcggatgcgctggctgtttgtgcgcgctgctgcagtcgtgtgcacgtagcggtgtgcgctctgacttgacgtaac

SEQ ID NO: 8524 - DNA, 210 bp, Homo sapiens
agtacttgtttggtggacctgaacctgattctctgtgacagtggcgactaaaattgtggcaccgcacttactgtgtacggaggaacaaacagactggcgtaggcactggtctgtgcatgtttgcatctataaaacagactacaactgtatcgtgattctacgtggtcctcggcctggcacactgtaatgagtgctgaattcgtaggacag

SEQ ID NO: 8525 - DNA, 178 bp, Homo sapiens
agtactggtgtgttgaatcggaaacctgatttactgtgcagatggccgagataaagaagggcacgtactaatagggcacggaggaacatagagacgagcctatggcactagtaaatgcatgtattgcatgtataaacaggactacaaccgtattctgatcctacagcggcccgacgcc

SEQ ID NO: 8526 - DNA, 306 bp, Homo sapiens
aggtacacactatgctgatggcacttagtaagtccagcgcatagacgagacagactacactagactctaaaatctgcacacacttcacgaaaattgaatggtatgtggagctgagaactgatgagagtgatcagatcacttcattgcaacagatatgccgtcagatgacgaggcacctgttcaactgctaagagccagacgtgccaacatgtctttacataaatgggcatatgatgacccacgagaaaggacactaagttacactgtgaaccgtatgtcatgaatgccgtgtagatgacgaccaag

SEQ ID NO: 8527 - DNA, 626 bp, Homo sapiens
  misc_feature (1)..(626): n = A, C, T or G
tgcaccataatccctgacgtagatgaaatgccagtgtcaggagaatgcagacatactcaatgacaacatanattataagatgaccactgaagtcttggaggctgaccatgatgtgcaatgatgagaatgataaaataaataacaatgagcttgatactgttgaatagatgttgcagctagacaagcaaaaatattgagaaagctcaagaaattcaatagaaaatgtgggacgagttagatctatggcattccacactaaatgtagctggattctgaaggttcagacattgttgaacaggagccaggacacgctcacgactggatggataacttgatgattgctttccagcagtatcagcaggtatcacagagagcagagtgtagaacctcacagttgaatagagccacagttaagatggaagaatatagagaccttctgaagagcactgtagcttggatagaanataccagtcatttgctggccaatgctgctgactatgactctttggagacactgagtcaccatgctagcactgtgcagatggctttagaagattcagaacagaagcacaatctgttacattgaatctttatggatctagaagaccgtgaatagtttatgaaac

SEQ ID NO: 8528 - DNA, 690 bp, Homo sapiens
  misc_feature (1)..(690): n = A, C, G or T
gcggcgcggaggtgannnaccatagtgccctggcanaagattgaaatgcgccaggtggnaaggaatgtcagaaaagctttataagacatagatgagaagattancaatgaagtcttaaaaagctcaccatcatatgcaatgangtagaaaaatagaagaaattaacaatgggcttcataatgttgaaaagatgttgcagcagaaaagcaaaaatattgagaaagctcaagaaattcaaaagaaaatgtgggacgagttagatctatggcattccaaactaaatgagctggattctgaagttcangacattgttgaacaggacccaggacaggctcaagantggatggataacttgatgattcctttccagcagtatcagcaagtatcacagagagcagagtgtagaacctcacagttgaataaggccacagttaagaatggagaatatagtgaccttctgaagagcacntgagcttggatagaaaataccagtcatttgctggccaatcctgctgactatgactcttttgagacactgagtcaccatgctagcactgtgcagatggctttggaagattcagaacagaagcacaatctgttacattcaatctttatggatctagaagacctgtcaataatttttgaaacagatgaattaacccaatccatacaagaagtaagtaatcaagt

SEQ ID NO: 8529 - DNA, 562 bp, Homo sapiens
  misc_feature (1)..(562): n = A, C, T or G
gtacaccatagtccctgcagacattgagatcccaggtggaggactgcanaagagctatatacaacatacatgataaggagatcagtgaagtcttgggaagctcaccatcatatgcaatgatgagaaaaatagaagaaggtaacaatgggcttcataatgttgaaaagatgttgcagcaggagaagcaaaaatattgagaaagctcaacacattcaaaagaagatgtgggacgagtcagatctatggcattccaaactaaatgagctggattctgaagttcgagacattgttgaacaggacccaggacaggctcaagaatggaggataacgtgatgattcctttgcagcagtatcagcgagtatcacagagagcagagtgtagaacctcacagttgaatagagccacagtgaagatggaggaatatagtgaccttctgaagagcactggagcttggatagaaaataccagtcattggctggcgaatgctgctgactatggagtcttggaggacactggagtcaccatgctaacactgtgcagatggcttgggaagatcagagc

SEQ ID NO: 8530 - DNA, 194 bp, Homo sapiens
tacactgtggaagctgcaggagtggtgaccgcactcggtggactgtctaaggactactgaatcattatctagacaacacaaccagtgagtctgtgagacggaagcactataagcactgatgtagtaatgataaaggaaggtaacatatgcagcttcatgaatgctgtaagaagatgtagcgacaagaaggaaga

SEQ ID NO: 8531 - DNA, 194 bp, Homo sapiens
actgtgggtgctgagtagtggactggacccgatggcctgttaagcccatctgtatcagtcgaacaacacagccatgtagttgtagcaggttgaactgacagaatggctggtgtcgcgcagggcagtacataacctgaatcgcttatgcatgtgttgcctagacacagagaagcaattcaataaagtatgacccc

SEQ ID NO: 8532 - DNA, 402 bp, Homo sapiens
  misc_feature (1)..(402): n = A, C, T or G
acacggtgggaggctgagtaggggtgacgaacctgcattgactgtatataccatctgtcacattatatccaacacaagaatatacactatagcaggttgaaattatacaatggatgttgtatctcagatctgcacataacttgcacaactaattgatgcttatataaatacataaagaataaatangacaataagtcacacttgaatatacgttatgtgatgatgagagcactgagagtgcgtccagatgtcctcagaacatcactgagcaggaatgaggtggctaatactctatccactcagacataacagacaaacgaggcacacgtgaacagngaccgaggatcctgactagcagactagggttgccagattcaacagaaaaaaatccaggattgacac

SEQ ID NO: 8533 - DNA, 178 bp, Homo sapiens
gctcaattgatacataggtaaatatacataacccagattgctactaatagaccaaaacatcgacatatgcctattgtcacgtatatatactactggcatagtgtatatctattgaaagttgatgggatggcacttcttgtcggataactgacacaaaagtgagggactcatagcaata

SEQ ID NO: 8534 - DNA, 178 bp, Homo sapiens
agtgccactgagcacagaggacacatacctgaccgatatgtgactaagatctcaacctacgacctgtggtcattgtaacggtatctagatgtggataagcgaccatcacactagactgtcgtgctatggtcccgctggtagggacctctcacctggggagtgccgactaagcttcctc

SEQ ID NO: 8535 - DNA, 450 bp, Homo sapiens
gagtactactgaaatcaagaatacatgtctgtcggataggtgacagagtaactctacgcagaacgtgagcacgttggaacggatgcagatatgtacataagagaacatcaccaaagagctcgtggcccatcagcgcacgtagaagactaacatactagtgaacgaaagcccataatgcacctcctcaatggttaggcctgtagcacacactcgcttgagaccctgacccgctaatgctacagacccgagaccaccggcaccctgtacctcggtcgtctccacgctaatcactactgaatacacggacgccggctagtctacgatatgggcatagctctcaacggcgctggcagcatgagctgagtattgtatagtgtgatcgaaatagctaggcgtatgcatggacatagctgataactgtgtgaatacagtatacggttgaaggtacct

SEQ ID NO: 8536 - DNA, 161 bp, Homo sapiens
gtgccacggtgccggaggacacatgcctggcggatatgtggactcagatctcaagcgagaacctgggccaggcgctacggatgtagatggacataagagaccatacacacagacttcgttccacgtccacgctggtgggaaacaatcatactggggaacga

SEQ ID NO: 8537 - DNA, 226 bp, Homo sapiens
atgtgctgccgatgtcataagtgcatggctgttgggatggccgcagaagtggctcgaacagacagtttataagccggtacagttaggtggagcacataaacaaaaaacacacaggagttctttccacatcatgacctcggtgaactgaatcattgtgcttactatggcttatgtctacacccactcgagtatgaccatacagaaccatactcagcagacagacgaa

SEQ ID NO: 8538 - DNA, 370 bp, Homo sapiens
  misc_feature (1)..(370): n = A, C, T or G
ccgacgtgtgcgtaaagacgggtgtcagtacagactgtgatgaaggctgttggagagactggctggaagcgtatatgacgttgtacaagacgtgatacacatagataatatatacacgctgctaactgtgacacatcatgataatgtactgtacccgtggtgttgtgctctagcttgcttttgcacgcacatngagtacgtaacatagatcctgaacatggactgaccagatccatagtagaatctgaacttgtacatctcggcgcatacagtgcatatatacacatgatgctgagccancacacaaggtgctgggagctgtggactagacctactggcagctgctgactcaggaacggagcatgagtgc

SEQ ID NO: 8539 - DNA, 162 bp, Homo sapiens
atatcggtagtagcagtgcaccgcgaataggtgttagctcaagaacgctctgacatgctacgcactatacctgaacagcgccggggaggatgaggggctcatgggcaagatcagcgtggaggactagaagaaagttctggacaagtgatatgaagttttata

SEQ ID NO: 8540 - DNA, 178 bp, Homo sapiens
actatgagatatggacacagacggtgtgagtgtgtgtgtggggaatgcgaaagcgggttgctgcttggtgcgttaggtgataaggcaaactagctgaagtgtttatcgtttgacattacagtgttgtttgttagaagtgtgatagctcataggtggtgactaatattgttttattgag

SEQ ID NO: 8541 - DNA, 194 bp, Homo sapiens
  misc_feature (1)..(194): n = A, C, T or G
taaactagacccaaaccacgacactcctcatcacgcaccccaccaggtaacagccttaacgctgcatacaaagtggtaaagcgaagggcacgcaacctcatataaagagacctgtgtgatcctcactacccagcgactgccggataacacaatcaacacctacaccatcacggcaangactacacgcacagcca

SEQ ID NO: 8542 - DNA, 226 bp, Homo sapiens
  misc_feature (1)..(226): n = A, C, T or G
actacatgatgcacanaaatactcgcactaaaacaacacacataatcaccactattgtgttctatgacatacatgtgttacacatgatcatactaatgttaataaggcaatgtaggtaaacactgcgcatacgaaatgccacctaaaacgtgcaagaaagaaggacagtggggaggagcaaggacacaataagcagctcttgaaaggaaccaatgaagcacctata

SEQ ID NO: 8543 - DNA, 178 bp, Homo sapiens
tcaggcggatctaaatagattagttaagaaaaaagatatgggtgtgatagtccgcagtgagatgtggtgggggagtgtggcttgcgtggagaatgggtggttttgaagactgagtgggtatggggcgggggagggagaggcgtgggtggctgtgggggtatggggggcggggtgacgc

SEQ ID NO: 8544 - DNA, 210 bp, Homo sapiens
gtggttattgttgcagtatcggcatgttaagatgaaactattctgccatcttactattattgtatgtgttttcatacattggagttgggggatggtttatgttggattacttaaagtaaataatacttaaaatccaaaaaaaaaaaaaaaaaaaacaaaaaagcttgtacctgcccgggcggctgctcgatactgatggtgtagtgtggg

SEQ ID NO: 8545 - DNA, 610 bp, Homo sapiens
  misc_feature (1)..(610): n = A, C, T or G
caggtcacacagcacatcagtggctacatgtgagctcagacctgggtctgctgctgtctgtcttcccaatatccatgaccttgactgatgcaggtgtctagggatacgtccatccccgtcctgctggagcccagagcacggaagcctggccctccgaggagacagaagggagtgtcggacaccatgacgagagcttggcagaataaataacttctttaaacaattttacggcatgaagaaatctggaccagtttattaaatgggatttctgccacaaaccttggaagaatcacatcatcttanncccaagtgaaaactgtgttgcgtaacaaagaacatgactgcgctccacacatacatcattgcccggcgaggcgggacacaagtcaacgacggaacacttgagacaggcctacaactgtgcacgggtcagaagcaagtttaagccatacttgctgcagtgagactacatttctgtctatagaagatacctgacttgatctgtttttcagctccagttcccagatgtgcgtgttgtggtccccaagtatcaccttccaatttctgggagcagtgctctggccggatccttgccgcgcggataaaaact

SEQ ID NO: 8546 - DNA, 311 bp, Homo sapiens
cacatctgtagactacgtgttgcgtggagaaggtgtctgccatgtacgctgtgtacttctacggcttcaacttgatttagcgccgtggatgatgaggggctcaggggaagaatgaatgaagattgatgaaacattgtgttggtcaagtgtggagcatgggtgtcgtggctggacgcaactttgttggctgacaatgtgcagtttaagcacaacaagaaagagctgaagcacgtgtgtaacaccatcatcagctgactgttgctgagatgtagagcggctgtacctcggccgcgaccacgctaatcactagt

SEQ ID NO: 8547 - DNA, 306 bp, Homo sapiens
caagcttttttttttttttttttttttttttttttttggaattttaaagtttttttattttgaattaaccaatttaaaaaatgggctggggttaagggttttaaaaaaaaaaaatagtggtaaaagggcggtttaatttattttttgcttgtaaaaacgggaaaaaaagcaggttaagtccttgccggggggggggttggaaataattatggaatttgggggggtttggagggggagcttagggggaagttccaaaggggtgggttgaaaagttggagttttttttggggttgtttaaaaagttgg

SEQ ID NO: 8548 - DNA, 194 bp, Homo sapiens
cactctgatggtgctattattgtggcagtctctttcctttatttgaacttatctttgaagaaaagaatatggcagatgctgacatagcatatgaacattaagttgaggagtctttattagctaaatagctcaaaatacaggtggtgaatgttgagctgcctattgatggcatataggaatgagagatacgtgaa

SEQ ID NO: 8549 - DNA, 226 bp, Homo sapiens
agttggcaaaagttcactctggggaattttgtgtgtgtgtgtgtgtgtgtgtgtgtgtgtgtgtgtgtgtgtgttttgggaaggggtggttgaggaagaagagtgctaggctggtgttttcttactccaaaatggaaatactgcccttgattcattctcacacgttatgtgaaaatacatcatagcagtcttggaaaagatctacgtcttggttctgtttagattt

SEQ ID NO: 8550 - DNA, 178 bp, Homo sapiens
tgtcgtttgtggggtggtttgtgtgttttggttgtcttcctgattctggtctggtttttctctttttggtgtttttctattgtcgatgtggtggtgttgcttgtttctggttccgttggtgttgggttctccttcgtggtgttggttgtgtgctgtgttactgtttttctctctgctg

SEQ ID NO: 8551 - DNA, 546 bp, Homo sapiens
caggtcacacagcacatcagtggctacatgtgagctcagacctgggtctgctgctgtctgtcttcccaatatccatgaccttgactgatgcaggtgtctagggatacgtccatccccgtcctgctggagcccagagcacggaagcctggccctccgaggagacagaagggagtgtcggacaccatgacgagagcttgaaatctggaccagtttattaaatgggatttctgccacaaaccttggaagaatcacatcatcttagcccaaggtgaaaactgtgttgcgtaacaaagaacatgactgcgctccacacatacatcattgcccggcgaggcgggacacaagtcaacgacggaacacttgagacaggcctacaactgtgcacggttcagaagcaggtttaagccatacttgctgcagtgagactacatttctgtctaaagaagatgtgtgagttccgtcctttgttattatttttaatgtcttaagatttatttgcttaccgtaatattgacttatttaaagtgtgtaaatcaaccaccttta

SEQ ID NO: 8552 - DNA, 258 bp, Homo sapiens
tatatgcggagatggactctactctgctttttcctataggacttcatgtgtgtgtgtgtatgtgttaaagatgtgttgttggtttccataagggaattctggaaatcaaatgtggtatgtttatgtgtacttgtaatcaggttgtcagtcccttgctgatatggctttgttttgtgtagatacgaaggaatcttaatcttcggggtgggatgaagagagaattatctatattctttgaacgcgttgttttaagaatca

SEQ ID NO: 8553 - DNA, 626 bp, Homo sapiens
atttaaaattagtcccctttatgcattttactctacatgtgttatccttgcaaagaaaaagactgacatctttgagagcaagagtttttgtcttattcacctctgtataatttccaacatcgtgctttgcacattggacattcaaaaaatgttatacaagattgactgcatcaatactggagtgttgtgtgagggttaggtgctgaggctgagaagtgtatgagggagacctgagattaaacctgccacataaagtggagagaagtagcaaggtcagggctatgaaataatcccaaaaactttagaatttctacataatacagttgacactactattctcaatagagctgctttcagtctcaaagggctgtggtatgtgtgcgtgtgtgtgtggtaaaaaagggaagcagcaggggaaggaagagaagtgtgatttcacaagacttaagtaatcttgtcattgctgctttttctgccagaaaattattaccttccctttaaaaatcattttcatatacattttactaacttccatgtcaatttcacccttttttttctaataatagctactatttattcgggaccaactagtatacttaggactatgctgggtgctggagtgccaa

SEQ ID NO: 8554 - DNA, 402 bp, Homo sapiens
agacacggggtgactgaggaggaagttagacggaggacagggaacgaaggggaggcaaacaagtcacgtgagatatggaccaattgcttaaagatgctacaacacatgtggaaaagtctctagcatgatggcagggagtggggcgatgtatggatactgattgcaatgcgcactgagtcataatctgggcaaaccatgaggccgacatctatatccgaagagcggaaactacagggaggatgtgttcggtgctgactatgtgaatgatctaattccaccagagctgcaagccatggaccatggtcatgcagaggaagatgcctaccacacgctaaggataaagccagatgacctgatatgtgacatgggagtctaagatgtctgctccttgttctacatatc

SEQ ID NO: 8555 - DNA, 290 bp, Homo sapiens
gtacaagctcttacttctattgatcctgtatgatctttcacggttctttcttgggcctcaaaaagagacacttattaatagaaaaaaaatgacaaggatgtccatcctttggctcccttccctcccccctcctgctgctccctaacccccactatattgagccatggctggggctgggtggcaggacagcccaaaacatgagggcaacaacattgaggggcataacactaatggaggtgtagcataagggcccaatggctcgattagacctctggtctctcacagatatt

SEQ ID NO: 8556 - DNA, 658 bp, Homo sapiens
  misc_feature (1)..(658): n = A, C, T or G
cagtctttcttcagtgggagcccaggattctgaatctacctctttaacagatgaagatgtctgccatgagttggaaggacctatctcctctcaagagaccagtgctacttcagggactaagagaattgatctcagccgaataagcctggaaagttctgcatccttggaaggatctctgtcgaagtttgccttacctgggaaatcagaagtgacatcttccttcaacgcgagtaatacaaatatcttccagaactatgcaatggaggttctcatctcaagttgctctcggtgtagaacttgtgattgtcttgtccatgatgaggaaatcatggctggctggacagcagatgattcaaatctcaatactacatgcccattctgtggcaatatcttcttaccctttctgaatatagaaataagagatttaagacgacctgnaagatactttctaaagtcaagcccatcaacagaaaatatgcactttccatcctccatttcaagtcagacggagcagtcttgcatttcaacatcagcctctggtcttgacacatctgctctctctgttcaagggaattttgatctaaatagcaaatctaaactgcaggaaaatttttgcacccgaagtattcagatccctgctaatagatcaaaaacagct

SEQ ID NO: 8557 - DNA, 546 bp, Homo sapiens
acacgtgcagcatgtcagctcagagcaaacgtaggggcctgcggccaagatcagtgtccattttggccattacatatgacttcataaagtgactttgttggtctgtgatgccagctctctgaaatgtgcacactaacataaactgggatggaatacggttcgtgtgacagactctggaacaggctctgtggtaccagcatatatggaggagcaaaggaccggagctgagaatgagccattggcgatatgaagaagagctgggtggtgcactcgggcatagatcgccaggcttgtatattgcacgtgtcgcatgctctaggcacgttccactgccaagtgtgactaggaaaatgaccacaccgatgtatataatgatgaggaatatggagcttgcgagcctactgtggacatggctgtggagatgatgggtgagtactgtatcgaggccaagcacagatagtctgggacatggtaatgaacgagtcggtcacgatacagatgcagatgttatgcagcatgtcagctgtactactatgagacgacgga

SEQ ID NO: 8558 - DNA, 450 bp, Homo sapiens
tgaatttggataatatgtgactgaaacacgagtggcaataaaaaagcaaacatgaactctggggtttaatagatcattacatcagtatcatagaccatgtgactgtggggcttataacttgtgtagcctaatgaagtgccaaaaaagagaattatgattcaaggggagcggatgaacaccactattacagttacagtttatgctgtatatggattacatcaaacaaacaaagaacttgcttgcgaatatattatatatgctctgtgaataacggatatgtatgtagtagactgtactcatgctaatccaaaatgctcagcgatatatacacgaatgcgactggacaaactgattccttcagttactgatggaagggcggcacgatcttctgaatatattgcatacctgacatactgacgggaagaggaagtgatgagaagcctataaaaa

SEQ ID NO: 8559 - DNA, 274 bp, Homo sapiens
cacatggggattatattttgtattggcaaaatgagaccacagctggcctgccatcagatcaacataaaaaccagtattatggtatatgagatgaatggatagaggtggggtttattccttattatagagaaacaaatgtatgtcttcatcagtcttattagggacatgaatagacgaatgtacaagtggcttgcctacgagcctgtgcgcttggcctacgagatcaatagggggagacagaaggaataaacgatggggtctggacaactgaggt

SEQ ID NO: 8560 - DNA, 178 bp, Homo sapiens
acggggggaggcctttcgtgcgagttttgcttcacaaggaaattagctggaaaaggcttcttaaagaaacacaagggaaaaggaaatagggcacaaggtattattgaaattcttttaaagagcagtaggagcttgaaagtttagaacctccattatgaattccaaccacggaaaagcc

SEQ ID NO: 8561 - DNA, 194 bp, Homo sapiens
gggtacacaagttcatacagacatctgtcatattctgagcagcacatatgagagaagctttgtgttctccttgctctcttgcatgtttgttttgagcttgtggctccacagagactctcatggatttatgacaaaattggcatgcgaatgatttttgaatcataacttgtctattattatgctgtagtgtggta

SEQ ID NO: 8562 - DNA, 322 bp, Homo sapiens
actactgtagtactggaatttttattgttttaaatgggtagaaaaatggtaatataataatatatgatatataaactttaaatgaaaaaaaatgatgtattgtagatatttgatgtagttttattttttaaattaatcataaatcagactttgattgtattgtagtgatatatgactttgaatatattataaatgggaaatgttgattttttaataatagacttatatgtagggtgttgttgcggttatgttgtgtgagtgaagtgtttggttttatttagtgtggtggggtttatttaaagaaaaagaaggtagtattagg

SEQ ID NO: 8563 - DNA, 354 bp, Homo sapiens
gtgctactgggaacataatgggtcaggtggctatctaacacgaatgatcaatgtgactacatctgaacatggtgttcagtgtgtgagactcacacagagctttaccagggtgtgaagatctgctgtgtgtgcgagcttcttctattaattaggaggactctgtgatggactgacctggatggcatatatatgggtcgattgcctcagcagatgagtatctgcagataaagcgacgttatgaggtaggtgaagatcaagacaacaacataccttatttgggacgactgagtatacacagttaatgagcataaacgaaatgttatatatgatgagtgagctgatggcgagaaacag

SEQ ID NO: 8564 - DNA, 226 bp, Homo sapiens
gttttttttttttttttttttttttccagctcaacccttctttaatgtcatccagggagggggccagggatggaggggaggggtggaggagcgagaggcagtgattggggggtgggattgaccacttgtgccatgaagaggggagactgggtatttgggtcaatcatataaaaagacaagggggtgggcgaactggacctggggggggataggacggggcatgggc

SEQ ID NO: 8565 - DNA, 370 bp, Homo sapiens
acagaggacgggaacaacaaagagtctgtgaacacacatgcaaaaaaactccataatcttatgtacgcagactgaataatgatctgctgggatgggaaaatgacgcaagaacacggatgtcacgaaacataccgtataaacgaggtggtgaatgaatgtaaagaaaagctgtacgtagtcctgcagaggatgtaacatgaagatcaagcagctgataagctggcagatgacatcacacaatacataacagcctgcaacaattatatcagatagagagacagaacattatgatgaggaacaatgaaatgatagtgatacagacaacgatgtagagaccatagcttgaaatgatggaagaaagtgaagtgaa

SEQ ID NO: 8566 - DNA, 226 bp, Homo sapiens
caactaggaaatatcggagaatgagactcagaagtatgctatgggatgctaccttgaagtcagaataacgctgtgtttaccatggaataaacgttaaattactgttgctttttggataagtatgtattacggcatgctgcacgataacaccttgtcgatttaaatttgattttttgttttcgtccatctaatgcattacatgctcatctcgaaagacttaaaatat

SEQ ID NO: 8567 - DNA, 194 bp, Homo sapiens
  misc_feature (1)..(194): n = A, C, T or G
acggatgatgaaatgatgacatcatctacgagtgcatgcttgtaaaggacagcttagaacagtcctatatgaacaatcacacctatcatgactggataaangaggcctagcgttgggactgatacacacacaacaacacagtgaagatgtttattngagtgtatttattctgatgccataggtaatgtagtttt

SEQ ID NO: 8568 - DNA, 578 bp, Homo sapiens
ggtacaatacgtgcatcatgactgtcattagaaacttggggctatgtggccaagttcactgttcattttggtttttccattttcattcagaaagtccctttgttggtctgtggagaaatatatatggaagtgtcacagtaacatacactgtgatgtaatgtgttttatgtactgtttttgagacaggctctgtgacagtgatcatatgatggaggagcataggacgagagcagagaaagagtcaagataaagccgaacaagaccggaaatccggaattgtgcacagatagataaggctaccctagtcagtgacgcaggatacagaagtgcttgatctactgtgcttaggtgttttatttatatttagatgaaaaaaatgataaccaccatctaaagtcacagagatgctgtgaagagatgtggaagcaatgtgagtgttttgataataacataaaggactgaaaggggggaaatagtagcctataaagtagttaaggatgcatatgaacataaaaaaacagagcaagaaaccggaaaaaaagaaaaagaaggagggaacgaagagcaaaaaaaagaga

SEQ ID NO: 8569 - DNA, 226 bp, Homo sapiens
aaaaaaaaaaaaaagctagaacaagtcctatttgttttttttctttttttgtaatgtgtccaatttattcaagatactccaaatcaaaaacagggcacaacaccaagcccgcggcccaacacgcgacggacaagctgaaaatgttttttaagcaagtggtgggtatttttgttgaggcgcgacgaagagagaacaaaaaaccacacaaaacaaacaacgaaaaaga

SEQ ID NO: 8570 - DNA, 194 bp, Homo sapiens
acagtcacagatgaaacaacatttgtaaggaccatttatgtaaactgctgagatgttatgttttcattttggttttcacagacacattcaagctctgtccgacatgccattaaagcactggctcagaccgcacgcatattttcattttttaagtaactggtaagtattttttttctcacaaacgcacaccggta

SEQ ID NO: 8571 - DNA, 274 bp, Homo sapiens
cagggactcgggctaagatcatgtgaatccagtggatgtgggtcagatatggacagtgtgtgactagttgcattaatctatgactgaatgctgagacacacctggcggtactagaaggaatgaacccacaaaggaacgcaccagcaatgtgttcatgacacatatgatgttttttagtatatcatacacacgcgagaatcatcactcgcagacttagcggcagagaactatagagacgacgactgtcagcgagcagccgaaggtggcactccaa

SEQ ID NO: 8572 - DNA, 274 bp, Homo sapiens
gtacaagcttttttttttttttttttttttttttttttttttttttttttttttttattttaaatcaattaaagatttatgaaatttattggggtacagggaataaccgggacaaaagggggagaaaagttggtaaaacaagtgtattttaaatattctatacaattttttttgtgtacatatttggaagtgatgggtatttaaaaaaaccgcatagaaatccacaaccttaaatattctgcaaaacaaaacattaggttctctcttccttaat

SEQ ID NO: 8573 - DNA, 162 bp, Homo sapiens
gttagggggaaaattattaatgattaatttttattttggtgtgtattggtatttgtgtttcttattgtatatattgtggaaggtgttgggagtgaagtttttgatttagagatttgtgtgagttttattattataatgattgatagttggtagaataaagta

SEQ ID NO: 8574 - DNA, 274 bp, Homo sapiens
aaggcttttttttttttttttttttttttttttgggtgggaactcatttttttattcttatatattatatattggatatctttacgaatgggatactttccatttggggtcagtgacaggtggtaaaaaaatttggaaacatcaggtctgaaatagtctgagatggtatggacttataaggggcaactggcacattcaaggactgtatgaaatggcattaaaggactgggttacaatggaggggtatctctaaaccgggagtaactggaacgca

SEQ ID NO: 8575 - DNA, 354 bp, Homo sapiens
ggtattgattatggaaaaaatgaatctgtttaggggttttttcccttaaaggaagggaaggaatttttttttatgggaaaaaacaatagttaaaaaaataaattgttttttgggaataaataacacgttaaatggaatggtataaaatatagatattttgttaaaaaagtttacctttgggtataataacaaaaaggggaatgggttttttttgtaatgaaggccggggtttatgtggaagcaaccaatattaagggggttgggctgtcgatttagctttgggttaaaaaaaatggttttggggctgttaattgttatttttaggggggaaaggggggtagaaagttgttttaa

SEQ ID NO: 8576 - DNA, 434 bp, Homo sapiens
gcacgattaggaatttatgcctattatcatagggatcgacatggtcctcttctctctcacctgtgatgctactgatatcttttgtcatctttctgattgtgggatgaggaaagtcttcatgtttttatgatatctctaatcttgtacacctcggaggaggtgtgttttcatctggggcacttgtaatggtggagctttgctcgatatgccatttttgcactggataagatagtaagcatatttggcaactggggggcaactggatagcataaattaaatcttaaatgctggttgtgccatctatggaagtaaacataatgaccaggggataatgcctaggctgggtgagtatatcggccctgaaatataggcttgtatgggcatattcttggactaattgccacaagacgaaggataaagagaaaatagaacag

SEQ ID NO: 8577 - DNA, 242 bp, Homo sapiens
ctatgttttgttgattatgttgtattagttagaatggtattgttttgtttttggttgttgttaagtgtggtgttgtgtggtgttgtgatggagttgttttggtagaagtggtgtgtgagttgatcgatttagtaggggatgtttgataatgggttaaatttatgtatgttagggtaatatgaatgatttaaatgattttgtgtgaaggagagattttatgaatgaaaaaagaaaggtaaaat

SEQ ID NO: 8578 - DNA, 450 bp, Homo sapiens
ctcggaggtgttggcttggttgatgcttcgccaggtgaggcgattggtgtgtgcgtgtcacatactttttataatcacaattcacatccagtgttgagcttgcggcgttgctgtggatgaacatgccacacactgtccgacaggtggagagatattgtgaaagtgtggggattggtgagtgagtggttttgtgtgatgaatctggcgatgtactttgcggtcggatgagtggtgtctgaatgagtgcgtgaaggctctgacatatttgacaggagtggtgcgttttgtggttagtgtcaccgtacgtgatactgatatgtgatagtggaggagatgattgtgtatattgagaggatggtgcaagagtgaagtgaaagagagaaaaagttgggagggagtggagagattagaggaagatgaaaaggggatgtggtgtgtgtgtatgtgagc

SEQ ID NO: 8579 - DNA, 290 bp, Homo sapiens
caggtacaagcttttttttttttttttttttttttttttttttttttttaatttaaatgaaataaagaatatgaaaattttttgggttcaggggataaagtggaaaaaatggtggaaaggagtggttaaaaaaggataaataaaatataataaatattaaggttgggtaaaaatttggtaaggaggggtatttaaaaaaaatggaaaaaaattcaatacttaaaaatttggaaataaaacaaattagtttttttttatataaaaaagggggggggaatgtggtggggtta

SEQ ID NO: 8580 - DNA, 402 bp, Homo sapiens
aagcttttttttttttttttttttttttttttggtttaaaggtttttttttgaaaaaaaaaaaaaataaatggggttttcatgtttttggaaaaagaaaaaaaaaagggaagggggacattcccattgggggaaatttttctttgggttaaattattttaattatgggaatgaaaacttatatcaataacaagggacattaaaaaaatattaattaaaaaaaagggaagggaatggggggagggagtctggggttgggagggaaggggtttatgggaaaacattcggggttaaggggactttcctggaaaatttctgggtttggggagattaagttaatttcagggtattcaaatttctcgggcggggggccgatgcaccctaatgattcgacccactagcc

SEQ ID NO: 8581 - DNA, 226 bp, Homo sapiens
gtgtttttggatataatgaaaccttttaagggggttttacgcttaaaggatggaatagaatcttttttatggcaaaaggataatgatctaagatataatttgtgtggtgtgtttaaatcacgatttccaatggaatgtgattaatatctatctgtgctcacgtagtcttctctgtggggtcatagggataagtgcgattgggtctcgtttgtagctaacgagaggg

SEQ ID NO: 8582 - DNA, 338 bp, Homo sapiens
gcacggaggatcattgttctctcttctttctctgcaggcttgacaagtccatcttatatctttggtatatcagcatccgcacgttcatgctggctaaagaagctatcttggatgattacattacatatgttagtcttattgtggggatactgttttgcggatgatggttgtttgaaagctgcgatttgatgtaccaagttttgattttctgccttttaaatattttgttttttttttctgttatgttgtagggtgatttgttggtggttgagtctttctttaccattattgtaacccttgtttatttttgggatattttatgtattgtatttaatttt

SEQ ID NO: 8583 - DNA, 466 bp, Homo sapiens
  misc_feature (1)..(466): n = A, C, T or G
cccaagactctcatgattgttcgacctttggggctatttgtatttatgacatcattcaaatacctgctttttgaaacactaatgcctacctgccctgggtggtaacaatgttgtaagggttgctcatttgagtgaatgtattttatatttttttcatcttggtactagttttttgttatttctttcgtaatattctacttgggtttgatgtatggctactatctcttatgttttcactcatgtacttangggctttttaggttttagttgttaatgtgtgtggtattttgttctctatattgttcatagatattttatttactgattgtagtgttgttaaatttagatgatttcatgatgaactcattaaccaggaaatggacgtgcgtaatacgtatattttttgtttttgactgtgtgttctttaataagttcttgaattttctattgcgagtgttagatggag

SEQ ID NO: 8584 - DNA, 210 bp, Homo sapiens
gttgtgtttgtggaaatgtgaccttttttgggggtttttgcttctaggggagtggatggttatgttgtttatggaatgagaatttttatgtaaaaaatattttgttttgtgtgtattaaaagggttattagatgatgtgttcttattttatatttatgttaagggatggtatttttgggttttatttacaagagagtgttgggtgtttgt

SEQ ID NO: 8585 - DNA, 338 bp, Homo sapiens
  misc_feature (1)..(338): n = A, C, T or G
ctggccttcaaaaagtcgtagtggctattttttttggacaaaagtaagaaatgttgttttaggagtaacacagttcaaaagagctttaaagaagcatgcacacttatcacaaacaactctntcaggtggccagtctgatcttggatataattcattatctaaagatgaagttagaagaggggatacatctactgaagacattcaagaagaaaaagataaaaaagggagtgattgtagttccttgtcagagagtgagagtacctcgggggaagaagcatgcatgtctgtgctgatcccagtgaatcctgggtccaggagtacctgcggtatttattttt

SEQ ID NO: 8586 - DNA, 210 bp, Homo sapiens
gggttagtgaacttgtgacttttgcatcctaatgtatgctaaaaaatttttacttccaacaccatgatattatgagcgactgttttgtgcttgctaatgatgctacctgggctgtgatctacacagactgtaagtctcattggggacaaactgctccaaggaactgttgtgattgtaacgctgctatcgggatgaaacctggcgcttcag

SEQ ID NO: 8587 - DNA, 466 bp, Homo sapiens
tgattatggaatcgtgaatatatacaagggttttttcccgtataggaattgaatgcactatttctgatgtgggacacatgctctttgatataatacattgatgtatgtgattgaattatgtgtctcattgatgatgatatacatactttgatatacatgtaatgtcttctttatagtgtgatgtatgatagtgcaattggtcaccatttgtggctgaggctaggggtagtttggaggattccaatcttgatatatttagagtatgcatcatacttttggttgaaattattcttgtcttgtgatatatcagatattagctcaagggacttgttatcaatgtttttgtcgaatgactttgatgatgttgctatgctggcacatctctcagaagatgtcaagggcacattctcagattgctccacatcctatgcattctattgaaattctctggctgcgtctcatcaca

SEQ ID NO: 8588 - DNA, 178 bp, Homo sapiens
gggtagatcagctgcgcccatcatctccgactgcatgcttgacaagtcacatacttacaacacacgtatatcaccaaccgcaccttgatgctggctacaagagctaaatagggagataacaacacaccgtacggacactggggacatatcgtaacacaggagtcataatggagagaaa

SEQ ID NO: 8589 - DNA, 530 bp, Homo sapiens
gtacaagcttttttttttttttttttttttttttttttataaaacaacgcaataccaacgaaatatgagacaaaacaataaaaaccaaagaaagaagatggggatagtagaaaaaaccaggttgcttgcaaaaaagacacatattaccttaggtccccccaaagataatgatggactttgaaaaaaaccaaaataaaatacggaaaataaatattaaataaataaaaacataaaacctactgttataaataacataaaggagagtttaacttggatgagatgcttaataaaattaaagtatgatgcgataagaataaagaactattaattggacaagtccagagaggcacaaattactatgaacactaaaccctccatgatgggcaagaggaaccggcaaccccagcggggaggtttatggtctggggggacgtccgattccaggggagaaaaaccagagcttgtaaacgttattgagacttctactggagagacgcacaatatatttcacaccaatctgttgtgggagg

SEQ ID NO: 8590 - DNA, 386 bp, Homo sapiens
  misc_feature (1)..(386): n = A, C, T or G
taccggttggggtcccaagtgacagtgtaattccagggggaggtggagcggctctcgatgttacgtgacatggaaacgcgctggttttcattgatgatgccaatgtcaagcttcatactacctcctggcacaggcgggcaactctcangcttttggaaaaaagtatgtcctactttggggattttccgagctgccgcctcactcagaaaggcaagccccaatatcgacagcagcaagtacttgaccatggctgggccatgcagggtcttcactgtcatgttgcgctggtggcttactttgtgcaggaagctctttctgtgaatgtatcttcctgaccctgccgggcggaagataaaacaaaaacgagaagaacaagcaagacaaga

SEQ ID NO: 8591 - DNA, 162 bp, Homo sapiens
tattaaaaaacctaattcttcacccaatttttttaatctgccaggaacacccaataatatttttaaatatatcactttaatagacttttcttttagatgtcttttcttgtaaaggaagaggtgatatgttttcatattgatgtgcttaattcaagttgatta

SEQ ID NO: 8592 - DNA, 386 bp, Homo sapiens
tttttttttttttttttttttttttttttttttttttttttttttttttttttttttttttttttttttttttaaaaccaaaatattttttggaggattatttgggggtttttttaaaatgaatggggtggtggaacagggggcctttggggtttgggggggggtcttttgggggttccatgcctgaattggggggattaaatttttagggggcctattcgaccagttggggggggtttttgttttttaaccgtgggccttccaattttactttttttggggcttggggggggagcccaatttggcacagggggatttttggaggggggggggcttaaagccacaggggggggaaaaaggggggctttcattgggaccctctaaaa

SEQ ID NO: 8593 - DNA, 162 bp, Homo sapiens
caagcttctttttcttttttttttcctttttgactttatcacaaaagtccaaattatgacccatgaaaaaatagagcgaaataaccttactgatgaaagaatacatggacctctgcatagatcacaaggacatggggggagaagggcgcgcccacgccgcct

SEQ ID NO: 8594 - DNA, 194 bp, Homo sapiens
  misc_feature (1)..(194): n = A, C, T or G
gaccgtcctaagtaatcacaccgtacactgcacacaaacatgggcaaccagcagctgctcctgcatgctttaagtgtaggaatnacatgaacatgaaatagtggacaaggagaaacaacaggccaaggaaccagctatcataggacaagacagaaatgaaaagacatgaccaacgtactggagcggcgtgatag

SEQ ID NO: 8595 - DNA, 402 bp, Homo sapiens
  misc_feature (1)..(402): n = A, C, T or G
tgcttaaccgatggctctgatgtggtcagtgaccttgaacacgaagagatgaaaatcctgagggaagttcttanaaaatcnaaaagagaatatgaccaggaagaagaaagggaagagaaaaaacagttatcagaggctaaaacagaagagcccacagtgcattccagtgaagctgcaataatgaataattcccaaggggatggtgaacattttgcacacccaccctcagaagttaaaatgcattttgctaatcagtcaatagaacctttgggaagaaaagtggaaaggtctgaaacttcctccctcccacaaaanagcctgaagattcctggcttatagcatgcgagcattgaaagaccaatagcaaacttatcagtacctgcccggcgggcggntgcaggg

SEQ ID NO: 8596 - DNA, 210 bp, Homo sapiens
tttttttttttttttttttttttttttttggtttttttaagtttttaaactttttatttgcataataaaaaaattgtgcattccaataattaaaatcatttgaacaaaaaaaaaaaaggcactctgaataaactggattacagcctggcaggacacctgggccagcttggggctactctaaaatccactggcggcccaccccacctcccc

SEQ ID NO: 8597 - DNA, 210 bp, Homo sapiens
  misc_feature (1)..(210): n = A, C, T or G
cccacactgtcaaatgtcaactccaccagcatctganaacaatgagtagtatgatgaaatgtagaaagaaggaaggtggtaggtaaaggagcggaatgaacgagtggggaaaggaggaaggagaganagagaaagaggaagagaaaggaagaagaaaaagacagcatggcccggcctagacacaaaaccaggaggtgatcaagctcagca

SEQ ID NO: 8598 - DNA, 210 bp, Homo sapiens
cgctgattgaaacaccactatattttctggatttaaaaaaaccttctactacccctcaaaatgaagaaattcgatgagttgttatactaataagatagcggcctatgactgaaaatgctgtccgccaaaatggacgactggtcaaaaatgacacactgtatggacaatcaacaacacacaccacccccgaaagcaacgccggcaggaccg

SEQ ID NO: 8599 - DNA, 290 bp, Homo sapiens
gaggtcgagtcctgctgggcttggcaacgagggactcggactcggcagcgacccagaccacacagacactgggtcaaggagtaagcagaggataaacaactggaaggagagcaagcacaaagccatgatggctacagcgtgtgctggtggaaaccaagataaagatgcccattttgcaccaccaagcaagcagaggctgttgtgttgtccaaaatcaaaactgcacatcaacagagcagagatctcaaagattatgcaagaatgtgaggaagaaagtttgtgggaaaaag

SEQ ID NO: 8600 - DNA, 258 bp, Homo sapiens
cgggctcggaggccgcttcacgttcacctcccacacgcccggtgaccatcaaatctgtctgcactccaattctaccaggatggctctctttgctggtggcaaactgggtgtgcatctcgacatccaagttgggggagcatgccaacaactaccctgagattgctgcaaaagataagctgacggagctacagctccgcgcccggcagttgcttgatcaagtggaacaaattcagaaagagcaagattaacaaaggtatt

SEQ ID NO: 8601 - DNA, 338 bp, Homo sapiens
aagctttttttttttttttttttttttttttttttttttttttttttttttttttttttttaaaaaaatgaaacattttttttaacagaaagagggtggggggggtggggtaaaaaagggtttttgagaaagttttaaaccgacccaggtcttgggggaaatttttggggttaggggggggggaaaaaaggcctaagctttaggagggggaatttgggggttttttgtggttttgtttaaaatagaattttttttggcttttttttggcactggtggtggggggggggggggaaaaggggggcacaggtttctgtttttgttttgtccccagatgttt

SEQ ID NO: 8602 - DNA, 162 bp, Homo sapiens
gaaggcatgatgttttgattttttttttttatttattatgctaaataagggttaaacagtgctacaagccggcaaacaaatagtacggatttcacgggagaagaagcaggaccacggcgaatagaaatgatgccgaaccaaaaagctgagaacatgttggga

SEQ ID NO: 8603 - DNA, 402 bp, Homo sapiens
tttttttttttttttttttttttttttttttttttttttttttttttttttttttttttttttttttttaaaaccaaaaaatttattggatgattaatggttgacttttttaaaatgaatgggatggtgcaacaggggccctttggggtttagggggggttccttcagggaatccatgcctgaattggggggatacaatttttaggggccttattcgaccacttcggggggtttttccttttttacccttggcactccagtttttcttttttttgggcttggcggggggcccacattggccaaagggcgatttttgaaggggggaggccttaaagccaaaggggcgggccaacgggggggttttattgggacgctttcaaaaagaagaagtttcttttgtta

SEQ ID NO: 8604 - DNA, 494 bp, Homo sapiens
tacatcttaaataagtctaataattttggttcatcttaaagtaaaaatacattgaaatgaatgagagagatctagattttaaaaaagttgaccattcattattgctggaactgaagaaaggaaggatacactggcatcacgatttgtctacataagtccagttcatctcgcgtttgttttggcaagaagaggacactacaaaactcacagtgcagtcaaaacaaaacaaaacaagaaaaaagcacaaaaatggtcggtggggaaccatataacaaaactacatctcaggcagctctttctcaaggaagattctaagattttattatgtggctaattctaaattggaaatggaacatgccggtatgtgaagcaattggtgctaggactttaccctttgctgatatgcaatgataatgtgatgagctttagtgactcttgaatcaggataatcacactctttaggtacctcggccgcgaccacgctaatcactagt

SEQ ID NO: 8605 - DNA, 178 bp, Homo sapiens
  misc_feature (1)..(178): n = A, C, T or G
ctctngagcttgtatggaggtaagagtagaaacaccattatgattgtaataaacgagtgcttgaatgatctggttatgggtggctgatatcacactatggtgtagctcatgtgagtgatgctcatgatgctagtaataccgatgtggttatggatggagactaatanggggattgatc

SEQ ID NO: 8606 - DNA, 194 bp, Homo sapiens
taaggaaagaagtaagaatgaaattgaagaaagatgattatgaaaaagaagggagaaaaagagaaaaataatttttttatgtttttatggttttatttttttttgatatttttttgattaaatttattttttatgaaaagaggtttgtgttgtttgttggatttttttttgttgtataagggattgtttgttga

SEQ ID NO: 8607 - DNA, 306 bp, Homo sapiens
gtactgtttggtaccttggattgcatgagttggtgggggccggcgggcctagccactgggcgtggaacgacaccggtaatagtgttgatggagtgtggaatagctgttacccttcactatgaccgctataacacatgctgaacgatggatcccattgcacaattgtatagtgttggaggcactactgggagcgattcttatacccaacaagcgatacaccgacataacaaatggtgggatgggtataatgatcatctgtcgctgccacatcgataaatactgaattgatagggaatatgttggttg

SEQ ID NO: 8608 - DNA, 306 bp, Homo sapiens
  misc_feature (1)..(306): n = A, C, T or G
gacgtgctccacgtggaacggtggttccatactgtcccttctgtacactatacaacgnatgtgagaagcaaaacangattatgatgagatatggccctacatggtttaccgacatatgcttatatgaaagactatgacttattctgcgttacatcacctctgttgtacaagatggtaacttgcgtataagacatgatgagattggtgtggttttatttgaatttttggttttgatttggtggttatttttatattgtatgagttgagtattatattttagtaacggcaaatgtgtcacccacattg

SEQ ID NO: 8609 - DNA, 242 bp, Homo sapiens
gggcaggtgtacgcgtcgttatctaatttttctgaatcggaggccaaaagaacaaacaagggcacgaaaataggccatgccttttttggacatttataaaaggtttttgttttattttatatagatggttgattatttatagtggtgaacagttgtataagatggttggttgttgccatgtttttgaaaatataatggatagattgtgttcatggaattggtttatattttgataatagaat

SEQ ID NO: 8610 - DNA, 226 bp, Homo sapiens
  misc_feature (1)..(226): n = A, C, T or G
ggctactgntccaaggaggtaaaaggtagcttactggttgtcctcccattcaggttanaaggagnaggtctgcggnctaggnagnntcaataaagtggattggtcttagtggggcgaaatattatgtnctttgttgtttggtatatatggnagggatggggnattattgtctaggtatgagggatggtatagtgaataggggcaaggcacgtcctccctagttttg

SEQ ID NO: 8611 - DNA, 194 bp, Homo sapiens
  misc_feature (1)..(194): n = A, C, T or G
gctgcaacggctattattcatcctagtgggntaatggagcantaggttagtattttgcgttgctgggtttggtttaatccacctcaactgcctgctatgtaggcataatattgagtatagtgaggagaaggcttacgtttcagtgtgggcatagtattgggtatatggagcgtagatggtggactgtacttgtg

SEQ ID NO: 8612 - DNA, 274 bp, Homo sapiens
ctgcaagcaggggggacgagcaacgtgagatgagcaggggatggccaggtgaagcggctggagatgttttaatgcaccgtcgcagggtgcaaatgagagagatcacaagcagcaaaacaactggatgagacgatgggaggggcaaggatgccagatgtcaagagatccatagcgctgagaggaatgtgggagggggatgctagagtcatagtaaaggggaaaccctatgctagctgtcaacagagttcacagggggtacgggataactgtcggt

SEQ ID NO: 8613 - DNA, 157 bp, Homo sapiens
  misc_feature (1)..(157): n = A, C, T or G
gntacatggncctgnttctcctatatggnaanaaaaanacatcccgcccctgnaatttcccagntcctctgnagnatttaatgggtgcctaaggagcatataatgaatgtcattgccatttacgaggtacctcggcccgaccacgctaatcactagt

SEQ ID NO: 8614 - DNA, 177 bp, Homo sapiens
ctactgttccaagaatggtaaagaggtagcttacgggtgctcctcgaattcagttaaaaagaaggggccggcggctaggaagtcaataaagggattggctttatgtgggcgaaaatattatgcctttgctgttgggcatatatggcaggatggggaatcacaccaccaccacaacct

SEQ ID NO: 8615 - DNA, 306 bp, Homo sapiens
taggggggggccccggggcgaggggccacaacaatgtaaaggcttatgctgggaggaaaagggcaaggttttgccggtgtttttttaaaaattatttttttgataggagggaagaaccggccttcgaagggaaaataaggtacctactaaaaaggggcccccttaatttaaggttaatgtgttaaagggggatgcccgcggtccctgggcggcaacaacgtaaataacaagggaactgggggccgcgggaggggggaaaataggggaaaactcccaaacagggggatgaatagttgggattttata

SEQ ID NO: 8616 - DNA, 466 bp, Homo sapiens
gatgtgattatcctaattcaagagtcactaaaactcatcacattatcattgcatatcagcaaagggtaaagtcctagcaccaattgcttcacataccagcatgttccatttccaatttagaattagccacataataaaatcttaaaatcttccttgagaaagagctgcctgagatgtagttttgttatatggttccccaccgaccatttttgtgcttttttcttgttttgttttgttttgactgcactgtgagttttgtagtgtcctcttcttgccaaaacaaacgcgagatgaactggacttatgtagacaaatcatgatgccagggtatccttcctttcttcagttccagcaataatgaatggtcaacttttttaaaatctaaatctctctcattcatttcaatgtatttttactttaaaatgaaccaaaaaaattaaacttatttaaaaagagaactgccggg

SEQ ID NO: 8617 - DNA, 402 bp, Homo sapiens
cctgggaagaaaatttggttggtggagggaaacgggggcagctccaaaagggatgctgttgttaggggcttaaaaacatggcctgcccccgggaaactgaacaagggatagagggggagctccccaaggctcctgtgtgttttactaaaagggcaacagtctcaagtgggggctggaggggaatacactgtttttaagggttagggaaaagagggtgaggggatggaattgaaaaaatatatttatttttaaaaatattggggagggaactctctactgaccttggaaaacgggaaacaagtgggcccctggggcgaaacaaccctaataactagggaattggggggcgccgggggggcaacactaggggaaagcccccaacgcgttgggagaatatctgga

SEQ ID NO: 8618 - DNA, 338 bp, Homo sapiens
ggcacgcgggcggggtgggggcgcacacccccccttctggcgcgcgcgcggtgagggggggggggcgtgggaggatggggggatacagtatcaaatgaaaaataaatgttaaaaaatcaaaaggggcgggctccttaaacaattttggcgggccaaaatgtgagggtatggaggggagggaaaaaaaaagggggggggcatggggggcggtgggtatatggttctttacggggggggggatagggatggacgcagcgggggcgccccctacgacaaaccacccgcaccctgccctccacacatgcggggctctctaaacatggcttccttctaagaac

SEQ ID NO: 8619 - DNA, 258 bp, Homo sapiens
tctggtcaaaagtcaaaaaaatggagtttacaatgggcataaatgtaaaaagtgactcaaatgggaggaaaacctgggggggaaggaggtatgcgggtgagtaaaaacttgcaaagcaggtggttaccctttgccatggaacgctcgccttaatacacctgattaagcacacaaggctggttgaaacattaggcagggagggtttgtgtcggctgggcaggaaggggggcatcacgctggaagaggaaagcagcgact

SEQ ID NO: 8620 - DNA, 242 bp, Homo sapiens
gctggtctggacggtcaagaaaatgcgggataaactactcaactggctactacgtggaatgacactgttatcgtcatcgtacagaacgacgacatccaaacgcatattgtagagatacggaccagtgtatggaccagggggatcgaggaaacccgcttcatctaatatgacctacacttataatatgttgaatgaggatggtgagtggtctgagcggaaaaaggggacccactgataagagg

SEQ ID NO: 8621 - DNA, 226 bp, Homo sapiens
  misc_feature (1)..(226): n = A, C, T or G
angaaataagactgagggttctatctacacttgtagcggacatcaaacaactaatgagccaattcctcctgctgcaactggtctaacggatgcagcagtttatactgatcgacatgatctctaaagcccataagccgaaaaatggcatctgagatatgctgggccaggtgatgttgtgacgagatgtcagtgatcagatcatctaccttgtcataggccatgaact

SEQ ID NO: 8622 - DNA, 162 bp, Homo sapiens
aattgccaaatttgggaaaaacacttgtgtgtgggccaaaccctgtggttaaaagaggttaattaataaatttactgacggggggaggggggttaaggtattgtgggttaaaggactgttgcgtaaaatgtctattcgctgcctacggctgccacaaaagcc

SEQ ID NO: 8623 - DNA, 194 bp, Homo sapiens
tgattagagagacggggaacagagccgcctttctacttggttgggcgtgttttccctggtcttattgtttgttctggttttaagctccaaaaaaggggggggccatgttatcttcaatatgttttggttgtgggggcgggtggtctttttatgtgaccaacagatgtccagaaaactagggagggaattttatt

SEQ ID NO: 8624 - DNA, 498 bp, Homo sapiens
caccctaacagagggaaattttttttaaaaaaataaataaaataaaaacaataagcaaagaaaaatggatgtaataggggtgggtaaactaaaaagctacaaaaaatgggtccctccacggaaaaaattatggaactgtaaaaaattgtgggaagaaactatttggaatttctcgagtttagtaaaacagggaaagaataagggaaaaagtgggataaagaggatgataaatttgggtaagggtgggggaattcaagccttccaactaaataaaacctattttccataccccattatgggggggacccaggggaacgggggcccatgttctggaaaggaattcggggagcgggggggaaaaaaaagcactttttggccaaaatataggggttttggtggtttcgggcctttgaaggcggggggggacacacagaagggggctataatggcaacacccctaataaagggagggggcttcaaagggaatttaaaaaaata

SEQ ID NO: 8625 - DNA, 514 bp, Homo sapiens
aaattcttttgtgaattatcgtgaggaaaaaatattttttattaaagaaaatctttaattaaacgagggggactaaaaccaaaaaaaatttaccaaaaagttaagcaccttaatcaatgggttcaactctatttttcgggcggggggaaaaaaggggggaaaaagccggggagggttggagggggttttttaaattttaaaactaattataaaaataacttgggagggggaaaaaaaaggcttaacccgggtttttaaactaacagcacagggtttcattcaccctttttacctaccccaaaaaaaaaaaaaaaaaaaaaaaaaaaaaagttggcccctgggggggacccacgctaataacttagggattggggggcggcgggggggccgaaattgggggaaagctcccagcgggtgggaggaatagttggatttttttttagggtaacttaaatagttgggggtatttagggatatggtggttttggggggaaattgtgtaccgggctcaacc

SEQ ID NO: 8626 - DNA, 178 bp, Homo sapiens
ctgtgttggtgggggggcgaaaaaaaataaaaagaagggtcttgagtggggtggaaagagggggaaaaaaaaaaggggggggaaaaagggggaaaatagggggggggggaaaggagggggcgcgtggcttttttggtggttgcgagaaagaaaaaaaccccttttgagggacgcgccc

SEQ ID NO: 8627 - DNA, 482 bp, Homo sapiens
aaaaaatgggttaaaaaaaaaaaaaaaaaaaaaactggtgctaacattttttatatttggggttttttttttaataacattaaaaatggaaagagtttttattttaagtgcctctggggttaaaaacaacctccatctccttggttaaaaaaacgctttgggcccctggagggaaaaaaatctgtgaggggtgggaaaatcatccaacccggaaaacatccttcaacaaaccgcccaagcaaagagtatgagggggggacatcaaaattagggtggggattttaatggaaatctctctcataacctcttttctttgggtctacagtaggggtaaaaaactccaaaggggatttaaaaaaaccaaaaattatttaaagggcccctcgcccgggaccacgccattctttagggatcgcgggcccgcgggcgggcggaccatggggaagaccccccaacgcgtggggtgcattggttggttttct

SEQ ID NO: 8628 - DNA, 482 bp, Homo sapiens
tagtgcatagtttttattatattcgttttccggagtggagcgcgtgtttgttccgtttgtgttcgtctaagacgtgaagaaaagctgatggtttgtggtgtatatatgttacacactgtgtggagtagtgggcatctgctaagtgaagcccacaagcactgtatttatccctgacctgtatactaccatctgctgccctccctagccgcaccaatctactaccttataccaagtattgcggatatgatcacaggtcataccagacaatgcagtgaacaagtgaaagaaatgcatgtggtgtgaagtgtgatatataaaaagcccatgcagaataccattgatgccctgatggaagagaaaatggcagcaaaaatttcattattctcacaagcctgaaacgcgtgaattacaagggcttaaagaaatactaatgcctctaacctttcctatagctgctttttatctgaagggttccttgaatg

SEQ ID NO: 8629 - DNA, 322 bp, Homo sapiens
gttgtgacagtgaccgtgggggatattgagattgagataaccaatatcactacgggcacaacatacatttatgacgctagagcaagaggccgagaataacgtggataataaaattgacaaagacagcagaggcctcaatacccacggactcctgtcttgacccgaagtagagactgttaagtcctgatgcgtcgcctgcccttccttcattgctgccctggaatgtacctgcccggccgttcccccaaaacagcccggaactggggctggttaatgcaggtgatgaaccagtggttggtattgtgtattgttttgttttaaa

SEQ ID NO: 8630 - DNA, 338 bp, Homo sapiens
tgtgaactgggacctttagtggtgggcattcatgctgcatatttgtgtgttgtgttgacctggtggggacggaacatcgagtcctgggtcgatgatggagctgatggagggctggatgactaatgggcggcccaggccgggggggaccaaactccaacacaagacaggagcgagacgtgaggggagggagggacacacggggcggccatggacgcagacagcaccgtgggctgtgcagtctttgttggaggcggagcacaagccggtatgaggatagggataaaattaatgggtatcacttccctttttttgtttttggtatttttaaccacataaat

SEQ ID NO: 8631 - DNA, 306 bp, Homo sapiens
gtgaaaatatggtgtttaggcgttttgtggaggttggtggggtggtctatgtttttttttggatcttatgctggaaaattggtagagattgtagatgtttttgtatatgaaaagggttttggttgatggatattgttttaaagtgaggagaatggtaatgtgttttatgtgtttgatgttaattgattttatttttagtttatgtaggtgtttattatatgtatgtcataatagtttggaaaaaggcagatattatttaaaaaagggtaaatataatgatgggttaagaagattgaagatagaaaa

SEQ ID NO: 8632 - DNA, 240 bp, Homo sapiens
tacatttttcaagctgtttttctttatgtttttgaaggaccatttttaattagctctttgatacaaagtaactcagaacgtcaaaacctgtacccactaaagggaaggctgccgggaaggcaaatggaacaggaatggagcctgtctcaggaaggccagccgcaggtcctccagaaaatcaaagaagggaagaaactctgagtttgaggtacctcggccgcgaccacgctaatcactagt

SEQ ID NO: 8633 - DNA, 194 bp, Homo sapiens
gtccccctctttttttttttttttttttttttttttttttttttttttttttttttttttttttttttttttttttttttttttttaaatagatttttttttttgaattttttgaaattttgaatttaaaatgaattgtggaggggggggggagtttcaatatgttggctgtgttttgggactgggttggcggc

SEQ ID NO: 8634 - DNA, 493 bp, Homo sapiens
acatattaaataagtctaataattttggttcatcttaaagtaaaaatacattgaaatgaatgagagagatctagattttaaaaaagttgaccattcattattgctggaactgaagaaaggaaggatacactggcatcacgatttgtctacataagtccagttcatctcgcgtttgttttggcaagaagaggacactacaaaactcacagtgcagtcaaaacaaaacaaaacaagaaaaaagcacaaaaatggtcggtggggaaccatataacaaaactacatctcaggcagctctttctcaaggaagattctaagattttattatgtggctaattctaaattggaaatggaacatgctggtatgtgaagcaattggtgctaggactttaccctttgctgatatgcaatgataatgtgatgagttttagtgactcttgaattaggataatcacactctttacgtacctcggccgcgcacacgctaatcactagt

SEQ ID NO: 8635 - DNA, 546 bp, Homo sapiens
acaagcttttttttttttttttttttttttttttttttttttgggagggttttgggtttttttttggttttttaaatttcaggaattggtttttttatttaattcattaacctttttttgaaaatatttgaaaaaaaaaatttttttttaaatttttttttttggtggggaaataaaaagttggaggttaggggaaattaagttgaaaaagaaatgggaacatccacccccacctttttggaaaaaaaaaaatgaatgggggggaaaccaagggtagaaggggaacagggggtagggggggcacgggggggggctggctttccacctccttacattttggttacaggggcccaaacccatttggggggctttggaaaaaaaaatggcaaggggttttggagtaaaaaggggggggggggaaaaaattctggatttcgggccctcacaaaaaaggtggtttagggttttcaagctgggaaaaacacattaaaacccgggggacttttggggggtggaggaaaacaaaaaaagggaaaacaacctgga

SEQ ID NO: 8636 - DNA, 290 bp, Homo sapiens
gggtgtgatatcttttttttttgtatatatatgttgtggttatggattatgatatattgtttttaataatggagatagaattgcttgttggattgaaagggagtgtttatttatatttattaagaaatagtataacgatagattgttggttaggttaagattgaatatatatttataaattaatattgagtatattatttgttgtgtttatattatgaattaaataaattgatatgatttattttattatttgaagtcattatattaataagattttattaggtaaaggt

SEQ ID NO: 8637 - DNA, 274 bp, Homo sapiens
ggtactttctatgaaaagggtttggccatatagttgttgttgacgttctgggtgaaaatggaagggttttgtggtccgaataagggggggaaacgataaacagggtttcctcatgaagaagggtgtttggacccttggtcgtgtccgtttgttattgatttgggggcatttctgttccagactaaggaaacttggacaaaaaaagaaaacattagttcgtggttgcatggtggatgtaaatttgactgttttaacctgggttattgtacaaatg

SEQ ID NO: 8638 - DNA, 338 bp, Homo sapiens
gtgccggcaccacatgaaatgggggaccctccgtttgctgttcatcagttgtgcatccttatacagttctgttggtaggatagaacaatgagcagacatctgcacgaggatgacacggctcaagctacatgcatgtgtacggtgatgtgctatgggccacaaaggtaccctatgcgtacatggaactttgattacaactagggcatatttatggctgatttaatgtgataacagtccccagtagtcgcttccgaataaatgaaaagtgctctactgtggggtctggcaagaaaaaagcaaaaatcatgatattcacgctcacatgcaaagaaagtata

SEQ ID NO: 8639 - DNA, 162 bp, Homo sapiens
aaccttttgcttatgctgttttttatttgtttgtttatttctatcatttgttttatataaaaaaaggtggaaagttgaatatatacaaaactaacaagataggaaacctggcaaataatacataatggctctaataatcacataatagcaagctgtcctgag

SEQ ID NO: 8640 - DNA, 194 bp, Homo sapiens
tgcacatgaaacacaagatgagaaagtgtgaagtggagacacagaatagtaagaaggggacaactagagacaagtctgttgaacaagagaaacaacaaaacaattgctgattcatgttgcaacaatatagagggacatcactggggcgagatgccggtgtgataatgtacactagcggtggagccttggcaccg

SEQ ID NO: 8641 - DNA, 322 bp, Homo sapiens
gcacaaaatctagatttgctaggctcgaggtagagaaggacatatgttatagtagatgaaaatgatggaatagcaatgagatacaaaatgcaactaaaaatgggataatctagatattagagaggacttcaaacatgcaaataggaaccacaggtgactatgatggtatatcgatttatgtgtgtgagtattcatggtattacaggctgaatgtaacagacacaagcaaataggttgcctaagactgtgtccttgttctgtcggatgtgggcggggaggatggtcatcttctctggtgtctcactgttagactttgaagcgg

SEQ ID NO: 8642 - DNA, 178 bp, Homo sapiens
gtacaatattggtaattattttatatctgtgaagggtgtgagttaaaaaaaataattcatagaatgacaaaaagtacttaactgttgtgttagctggagtgaaaggtatgatgatatatattaactggaaacagatgaatgtccacggagctttctgttggagaggacattgcagccg

SEQ ID NO: 8643 - DNA, 466 bp, Homo sapiens
gtaccaatacgaccaattgtgtacacatcctgtataggcatgtgcatgggcttgacaatgggacgagtgggtggtaggatgcagtcaaaagcctcaagcatagtggttccaatggaattgtgcatacttaggggtgtactttccatccatatgaactattgcttgtaagcacattggcttccaagatgttgagagcatttaaaacaaagattggcacaagagatactgtgtatgagatagagagaatttttttggtgatagggatggattcatttgcaataagattatgtctataatagcagtttggcggattcaggcgaatccatgatgtaaataccgaccgtggggtcgcaccgaagctagtgtgttggatctaaaggtttgctatatgtggtgaccatcagtgtttaatgccatctacaatatggagcatctctcccttaaaccatctggaacagccacagcc

SEQ ID NO: 8644 - DNA, 258 bp, Homo sapiens
taaattaattagggaaagggttttgaggggggggggtggaagaaaggggttgggtttggtttgtttctcctcccaaaaaaaagccactaaagcagttacagaaatgaagggtaaaatgggggccacaaagccatggtatgtagctttagctcagggaaaaaaagagcgccgggctcacctcattaaccagtatatgcagagatgggcaggggtacctgccgggggcgccgggcggcgggtcgcgctggggccggggct

SEQ ID NO: 8645 - DNA, 178 bp, Homo sapiens
agtactgtttttgttttttgtttgttttttgaagcgagagatgacggtatgggggaaaaatggatgggaaaaggggaacaaaggagagggaggatgcgaggaaaagcaccatccacgcgatgagagaggctattagtgagggacagagtggggacaaaagagagcaaagggaacgtga

SEQ ID NO: 8646 - DNA, 386 bp, Homo sapiens
catttttttttttgttttttttttttttctttctattttttttttttttttttttttttttttttttgactttctttgttttttttgtgatgcttttttttttttttttttatagtaatcaaaatataaaaaaaaaaaaaaggaccggggggaaaaaatctggggaaaaactaaaaaaacgggggggaaaaacaaaaaaaaaaaaaagaaaaataaaagcgggcgagccacaaatggggggggaaaggggaaaaaaaaaaaagaaaaaaaaaaaagtaacaaagggggccccggggagggggggcagaagggaaaaaacacccatcccgggaggggagaggggggaaaaaaaaaaaaaaaaaacaccaaaaaacgcccttcgggca

SEQ ID NO: 8647 - DNA, 450 bp, Homo sapiens
caagctttttttttttttttttttttttttttttttttttttttttttttttttttttttttttttttttttttttttttttttttttttttttaaaaaacggggcattaattaaaaaaaaagggggacaaaagaagggggggggggaagtcacaccaaaactgggggtaaaagaggggggggataaactggaaaaacaaatcaaaaagggggggcaagaacaagaagggagtggggaaattataagtgggaaaaaagccaaagataaaaaaccaccacaaaagggggtccatatgggaaggattcacacatgaggggggtggatcaaggaaagggtcctatccattgaaaaatatatcattgcggccatcatatgaagcgagagcaccctgcaatgaagaatgttaaggggggggtggagagggggaataaaattgggggaatggccac

SEQ ID NO: 8648 - DNA, 394 bp, Homo sapiens
ctattttttttatttttttttttttttcaacatatatacaaaacatcatggtaaaatgtaaaaggaaaatggagtgcgactaggaataatgaataatagaagattataaataaatacgatattaatataaattaattagcggtcataatataatgattcacaacgaaactctggaacatatataatagcctcatgacattactatttaaataaacatgatctgcatccaaactatttaatgcttatttactgcattaccttcggagacagggtctagctctgtcgaccaggctggagagcaggggtgcgatcttggctctgtggaaccgacgcctcccaggcccaagcgatcctcccgcctcacacctcggccgcgaccacgctaatcactagt

SEQ ID NO: 8649 - DNA, 162 bp, Homo sapiens
agtatttttatttttttttttttttataaaaaaaaggacaccacgaaaaaggaagacggcaaaggaacccacacgtaaaacaaacacaaacggcaaaaagaaacaactccctcaaaaacgcggccggaagacaacccaggggggggggagcgaggaaaaaac

SEQ ID NO: 8650 - DNA, 482 bp, Homo sapiens
tttgtttttgttgtttgtttggtttttggggttctaaaaccgggaaggggggtattcttggttccagcaaacgtaaaaagggaagaaaaatgggtaaaagggaacaatgaagctcggagggaagttttccggggggacaaggggggcttaaaggtaaaaaaggtgtctgtaagggatgtcggtgggggaaacgtggcgggggacagaaaaaatgacccaccaagggaagcagggggcttaactgctaaggggataatccggaacaatccaggcaaaataagggcgggttatgcccttgtatggaatggccatagggttaaaatggcatgcaggtttgttgagaggaaggaaaaaatggatggccgtgcgggtaaaaagctggaagatggcccaaatcgttgagagtgtggtgatgttgccatgggggatgtggtgcggtgagagcacatgtgtgtggaaagcctctaatactacgcaacttt

SEQ ID NO: 8651 - DNA, 386 bp, Homo sapiens
gtacttgttttatttgttttggggtatttttataaaacaaaaaacaaaataaaagccttgaaaaataacggggggcaagcaaagcgggaaaaagggggaaaagcacctcccggaggggaacccccgggggcaaggcccagccaaagagacgggacagagacaagaaaccgggaaaaggaaatataaaaaaagggaaagggcgagcccacagaaacccaaaggcggcacaggggggccggggcgggagaacggggacccaggaagccaggaaaaagagggaacaaaaaaaagggagacggaggagggaaaaccagggaaccaccggcggcagcaggcgggggcgaagggggggaggcaaggggagggacagaggaactaaaaaaagg

SEQ ID NO: 8652 - DNA, 159 bp, Homo sapiens
gtacaaatttagtaatttatttgtaaattctgccagaatactttctagctgctttgtaattttttaagagtgttattttgtttttgtttttctgttctttgttgtggctcttgttttcatttttgttgtacctcggccgcgaccacgctaatcactagt

SEQ ID NO: 8653 - DNA, 274 bp, Homo sapiens
ctgatccatcacacatactgcgtggttctgatatagggtgagtttgtcgttgctgctcattgatatgcaataaggaacttaaggaggccttctgacagaagtcactggtcctgttttgtctgaatgagctgcaaaggttgacttgggtggtggcgagaactacatgacacagatgagagtgtgattatgggaaatgccctgaacagttctgagatgctatatatttggaaaggcgtgttggtttgagtgtgggaatatcaaaggacaccaccag

SEQ ID NO: 8654 - DNA, 480 bp, Homo sapiens
gtacggctcggagggccgcttcacgttcacctcccacacgcccggtgaccatcaaatctgtctgcactccaattctaccaggatggctctcttcgctggtggcaaactgcgggtgcatctcgacatccaggttggggagcatgccaacaactaccctgagattgctgcaaaagataagctgacggagctacagctccgcgcccgccagttgcttgatcaggtggaacagattcagaaggagcaggattaccaaaggtatcgtgaagagcgcttccgactgacgagcgagagcaccaaccagagggtcctatggtggtccattgctcagactgtcatcctcatcctcactggcatctggcagatgcgtcacctcaagagcttctttgaggccaagaagctggtgtagtgccctctttgtatgaccctttccttttacctcatttatttggtacctcggccgcgaccacgctaatcactagt

SEQ ID NO: 8655 - DNA, 316 bp, Homo sapiens
gcaccacgagtttgagaaggagatgggagtgtgatggatgccaaacgaatattctagtgctccatcagcttgcgaggatgtacagaaccggggaactgagatactcatatccatgttgggctgtaaaaaggctgtcaaaaccataagatgcacgatggacaatatgctgtgggcctggggacacatactgaaagacggggggaggaggggaaggggagggggcgaatcgttggtagcggggggaaagtggaagacagtgagaagacctaggccgcgacgacgctaatgactagggaattagcgggcgactgggagc

SEQ ID NO: 8656 - DNA, 514 bp, Homo sapiens
gcgtgctcaagctttttctcctttctatgtttttttatgtatttatccttgccgtgtgtagcatgtgactttaaaaaaaaccaacattatccacaagggataggcacatgaagggggagatggtggttgaaaagatgttgacctagaaaataaggcctagcacacagtcactgaaagactattggatagtacagaggggacatgaaagacggaagtgtgtggagaacattgacagaccaaaagttgaagggggaaagaaaaacacaagacggccatgtcaccgaatgttgtggagtggggggggggaggcgctcgggcaacagacaggccatataacagacgatctacagagagggcacagggacagggagcacggtgaagcaggagccagggaggtggaaagcgacatggccgggaatggggagagccaaatattgtgatctacagatagtgcacctctgatggcgagagaccatgcacctgaagctctgtatgtataatggacggcccaaac

SEQ ID NO: 8657 - DNA, 194 bp, Homo sapiens
tacaagcttttttttttttttttttttttttttttggtaatggtctttttattggaaaaaaaaaaaaaaaaaataacatttacaacatgggaaggaagtaaactgtaatttctttgaacaacaatggtggtgggtggggtgaaaaccacaaccccaaaccacttcgccggctccaaatgatgggataaaaaggt

SEQ ID NO: 8658 - DNA, 162 bp, Homo sapiens
ggtactcgtgcgcccggcttcgcttttctccgcacgccgtctgacaaaccggtatggctgatatcgacatattcgataaggtgaaactgaagaaaaacagagacgcaagaaaaaaatacactggcttccaaaaaaacgaatgaacaggagaaacaagcaagc

SEQ ID NO: 8659 - DNA, 242 bp, Homo sapiens
gagtgcaaactttttgcttctattcatctacaatgtatctttccatgtaaatcccatatcttgatgctggggtcctgtgagcagcacacagccagtatcggatagggctgaaaccaaggcgttgatgatgtgcacaccatgtatcgtgtgaaggtgagagactttggtgaaatccgatatcatggtatgatcatccgtgcctccacacacacagatggatccatctggatatacaaccaccg

SEQ ID NO: 8660 - DNA, 290 bp, Homo sapiens
tcatataaaacagcaaaataaaatagtcgtgggcacaggccagtgattctgcagttagagccgtgtggactcggtcccccatctccggtgagggcgtctcctgcacacggcacccatgcttcaggtcgcacacacgtgccgtggacccaagttcacctttggaggtgtcaatccccccaagaagatgttgctaacttggagtttggggcctaggctttcatcagagtcttccccacagaaagcgaaatgggaatgggtccttaataagctacgggcctttgttcacagca

SEQ ID NO: 8661 - DNA, 162 bp, Homo sapiens
ttagaaaggcttgtttagggtttaaaagactggttgttcctgattgtttattggtcccatggtgttttctgtgttaacctgggaaaggcagccttaattacctaaaaaaagaaaaaaaaaaaaaagaaaaattatgtgtgagatttttttttaaagtgggga

SEQ ID NO: 8662 - DNA, 162 bp, Homo sapiens
gactctggggtgatgaatggggagaggagagaaagtgaatcactatatcattctatacataagaatcagtccaggtggattaacaattttaatatgatagagaaaatatatatactttagaagatataggaaaagtatgtgtagtcctctagggtggggaag

SEQ ID NO: 8663 - DNA, 258 bp, Homo sapiens
ggttttaaatttggaaatctaaaatttttttccaacaatcttttgggagggtggacctgggttttttcttttaggttttggtccctctgtttttttattttttttctttttggaattttatttttatttgtttttggttcattttttatggttatataggggggggggtgagagaaataacggagaacgtgggtgagcaagccggtgttaaaagatgggaaaagagtgtggggcaccaaaaaccttgttccctcaagt

SEQ ID NO: 8664 - DNA, 482 bp, Homo sapiens
  misc_feature (1)..(482): n = A, C, T or G
taaaattatactggtggcggtttctgtctatgtgggggatgttctccnttattaccagttacatcctcttcagagctacccgaaaacccctctcaggaaggacaccacgagtggtctacaaatggtttcttttgatctacaaactcagctatgcatttggtgttgtgggttacttggcgatcatgtttacaatgtgtggattcaatctgtttttcaaaatcaaagctagagattccatggattttggcattgtgtctttgttctacggcctctactatggagtaatggggagagactttaccgagatctgctcagactacatggccttcactatagggttctacagtgtcaggcggttggctacaaggagcttatcggacaatatctgggccagttgggggcagaagatcattggggagcgtgatgaagaaagggtcatgaaaacatctatcagcgtttctggtatcttgtcttcattgatt

SEQ ID NO: 8665 - DNA, 162 bp, Homo sapiens
tgaaaaggatagtggggtgtgggaagggacaaaggaaaggaatatatggtgaggttaaaatgaagaaaaagagtaaggcaaagaaagtattgagatttatattttgatggggatggttgggagggttgaggtgggaattaatttggaaagaaaaatagatgt

SEQ ID NO: 8666 - DNA, 578 bp, Homo sapiens
ataataaaaacaatgaaaataacagtatgtaaataatggtatgtaaaaatctaacaatcacgtgaaattgaagaatttggcatgtaaaatgaataatactgtcttcccccaagaagtttagcaccaaactggctctggtgctgagataaggaattccaggccaggcttacatcgcaactcagtcctcaaaagccctctcgtgcagaatgagaaggcacaagcatatatacccattttgttttcaccttccatctctctcaatcaaatcttacttctcattttaggaagtatatagtccaaaatgggcttttaattactctttgatccttccaccccaccctgcccttttctttcctagcaaggaaatgacaatgagtgtggcctatagacaagggtaattacagatacaccagtgggctgtgtcgcccaggataaggggggagagctcaaagctggtcagtgtgtgtgctcctctctccacttagctgtcattccaccctgtgcttttctacttccctcttacaaggggcaacaggggcgggggagccccacggcacgtccaaggcataggttaatga

SEQ ID NO: 8667 - DNA, 162 bp, Homo sapiens
  misc_feature (1)..(162): n = A, C, T or G
gcccagctctgggaactgaattangaaactcaaatcgaatagggaagcaaaaaaaacaaaacaaaaaaaacaaaaaaaaacaaaaaaaaaaaaccctattttaaatggaaagggagcttaaaaaaaatttttttaagggagggaagaaagggagaaaatttt

SEQ ID NO: 8668 - DNA, 162 bp, Homo sapiens
actttgtgatatctcatagggcatactggtctttcaccatttcgcccccactttttgcccatatttcccaagctccccccctacagcaccttccatgtgctcgtgccttcatccagcacctgctccccaatgtattccgtggtagcaggtgatgtaacacac

SEQ ID NO: 8669 - DNA, 210 bp, Homo sapiens
gtatagagagggagaggtttttttgttttatagtagagagggggtttcaaaggtgttaaggaggatggtttagatataatgaaatagtgatttggaatagtaggaatacataagtgatgggaattaaggggatgaggtggagaagtatgagaaggattattatttttaatagaaaaaagaaaaggaagagaaaagaggtgaggtgtgagg

SEQ ID NO: 8670 - DNA, 562 bp, Homo sapiens
gagcggccgcccttttttttttttttttttttttttttttttttttggcgtttcaccttatttatttatgtatttattgagacggagtttcccctcttgtcgcccaggctggagtgcagtggcacaatctcggctcactgccacctccgcctgacaggttcaagcgattctcctccctcagcctcccaaggagctgggattacagctgcaagatacaaaccctgtcctcacttacgtacaattcatctctgacatgaagcagtctcccggggctccgcgtctgttcgctctgggattaaattcgcgtaggcactggggaggcgggagctgccttcgcagatatttagcatatgaggatcgaaggccagtgggaaccgtgaggagacgcacaaccgtggtttgggcccaggggcctggggggattgcgagggggggtcagctgccaagaaggccaaaaatagccggacgggtggggggggaggcgggcaaggagaagaagctgggcaatggcggctggtagttctgggtgcttcctccggtcccttcaaccccacctccaccg

SEQ ID NO: 8671 - DNA, 226 bp, Homo sapiens
cggccgccctttttttttttttttttttttttttttttttttttttttttttttttttttttttttttttttttttttttttttttttttttttttaaaaaaaaaaggctttaattttttataatggattcaagccaacaaaggtgttcaaaaaaaattcaaaaaggaaaaaaggtcaaaatttaaaaataggggggaaattttcagtttgaaagggtaaaaggat

SEQ ID NO: 8672 - DNA, 226 bp, Homo sapiens
cctttttttgtttttttttttaaggatatgtttttattgctaccagagggttttatcttcagtatacatgcgttgactggcaatacctgtgttcagactgcagagggagctcaggatgcagaagtcatgttaagaaacataaggctggggagggggggggagtaagttctattagaaaatgccaatagcttaacaaacctgagggtattacattcagttataccat

SEQ ID NO: 8673 - DNA, 338 bp, Homo sapiens
agcttttttttttttttttttttttttttggattttattttaaagttttattaagaaaaaaaaaaaaattaaatggggtattcatggttttggaaaaagagaaaaaaaagggaaggggaacaatcccataagggaacattattctttgggttaaataatattaattatggaaatgaaaactaataacataacaagggaaattaaaaaaaataaattaagaaaaaggaaaagagaaggggaaaaggattctgaatatgggagaaatgtgtgttatggaaaaagattcggggttcagggtaatttcctggagaatttctggctttgaagcggttaagtca

SEQ ID NO: 8674 - DNA, 258 bp, Homo sapiens
gaaggaacagatggactcatacactccacgatgtaagctggactagtccaacttccaacgtccgtataacgccatatgtatcttattgctgtatatagtggcaaatagaatagacaacaagtgagaggtacgactaataggggagaaaaggaacacatatgtgataggtgatgagctctgacatctgatgaaataggtgacgaacttctaccatgaacaaaatgtgttgccccacttcagataggttcatcatcttag

SEQ ID NO: 8675 - DNA, 242 bp, Homo sapiens
tgattgtggagttattcaatatataaaaagggatattcgagatgacttgaatgagctgtcttattattcgtgtactgagatgaatgttcaacgcataagtagtatatgagttcatacaagtgatggctgaagtgctgtcagcagctaatatggtgagcgaaaaggagtcagatggtgtttcgaggtcgaagagcatccgagttaatggtggtcctgcgcgccagattcgaattggaaatatc

SEQ ID NO: 8676 - DNA, 418 bp, Homo sapiens
gggtcctgacgcccaggatgggagtttctgtgaaggcactttcagataaacattaatattttaatttgattcaaaaaggaaaatggaggggctataaacctgatttttttaattaatttattttaaaaagtcaccagggataataagttcggacagttacggaaatatttttaccatacaaaataaaaagataattcaaaaaatttcttatgggaattgacgtccagaatttaggtccatgttcactagctaacccacttagtagggtggggcgagcacaaactctaccttcccatttctaggcctgttcctccctccttaaggggggaataaatattaacagggtggtggtgaggtttaattgagataaagatttatctactaaaataactcagtgatactttatggttatagtcaa

SEQ ID NO: 8677 - DNA, 258 bp, Homo sapiens
gtacgggccaggctcctaatctttgggattcattggcaaataatttaagtgtggtgtattattaaatagacaaaaggtaagttgcaaggttgaaggatcacttgataagtgagactggtgatgaacattgatgcgcttaaaagtgaagatgcttacagaataaatgaagagcagctgtccttctttcctccttctagatgttcatgctgtggcatgctcagaggttcctgcatggataggagatgggagcggagtgat

SEQ ID NO: 8678 - DNA, 226 bp, Homo sapiens
ggttcgggggggaggaggtaatcccttcatatttcaatgttttctttttgcttattttttgtattctggtgtatggcgtaagtacagataatgcttcatctcgaatggtcgtttttatataatttttttttttctcttatcatcatgattcatttaacaaaatgtttcaagcttactcaggtatgctatagtgtactacagatgaatgttgggttaaatatagagg

SEQ ID NO: 8679 - DNA, 194 bp, Homo sapiens
agctttttttttttttttttttttttttttctttttaagttttctttttaaaacacacaaaattcaatttttttttccttttttttgcaacagaaaaaaagaattgaaattggacctcccccttagggaaactttttcttttggttaacttattttaattattgaaaataacacttatataaataacagggaca

SEQ ID NO: 8680 - DNA, 162 bp, Homo sapiens
cttcgttttgctttctcttcctttcttcgtacaacaccatgtatatgcaggtgaaagagatgaccaagactagtaggctgaattagaaatttatgctgactctatctaataataattatgttggtttatgtttatctctattaaatagtgcttttggggaat

SEQ ID NO: 8681 - DNA, 162 bp, Homo sapiens
gtgtacgcaggagtccctgcgttgttcagctcctgtgcttgctgtatttttgcactttctcacagacctatatcatcaaacgctcataactactgtgctattgagtggtaactttgctgatagggctgctcaattcatgtatgatggagataatgctcacgg

SEQ ID NO: 8682 - DNA, 210 bp, Homo sapiens
aaatatgaatgttaatatataaagataaagtattgggaaaaagaattataattaaatgtcacatataaaatggattgatgggaagaaatgagaaacagggtaaagtataaaatggaagtggatcaagaataaaaaaaagagaattatgaacaaaaaaggaaagaaatatatagtcgggattacaagaaagaaatgaagtcaaataaaaaa

SEQ ID NO: 8683 - DNA, 194 bp, Homo sapiens
gattatggaaattgaagttatttaggggtttttaaattaagggaagtggaggtattttttttagggaaaaagaatattaattaaaaaaatagttggtttttgtgtatttaaaaagaattaaaaaggaatggttataattaatattttatggttagaaaaggtttagtgttgggtttttataaataaagtgtgga

SEQ ID NO: 8684 - DNA, 162 bp, Homo sapiens
ataagaggataaaaaacttcgaaagtaaagacacagaaatgacgaagctgaaggctgagagtctcccttctcacttactccatgctttatttagcattccctaaacggtgaggaggcagcggctgttatggtgtgggacaaaaccagccaccgggagatgat

SEQ ID NO: 8685 - DNA, 226 bp, Homo sapiens
gtctctgttagaggatgtgactgtgtggatggactatatatagagaagatgggtgtctagagcttagtgctaagagcctatgcgcgcaagagatatctcaaattcatagttagatgaaatgcgaggaatgtgctgctatgattgacaagaggagtagaaatgatgtactcatcctcttctacacgacataatgcaaaataggatgacatagattgtgggaatggat

SEQ ID NO: 8686 - DNA, 546 bp, Homo sapiens
tattattatcgcactcgagtctaagaggctgcactcaaagcaataagctgtgtcaacggtgtccgaggagggtaatagttgatcagaggacattgaaaatgaatcttgctgcttcatggtatattaatatctgaatagtcagacaactgtaatattatggaataaacacatcgtcaaatatatcattaatatcataaggataggtacacatggaacgttatgtacctcggacgatactgactgttatcactattgtatccggagacgtgtgcgcgtcgaccatatctgagagcgcggacggtgtaggatgcatatgtagactatgctatattgtcgtctacatagttggacatattcatggtcatagctgtcttctgtgtgatattgttatctgttcactatatcactcgacatacgagtcgtaatcatagagtgctgtgtgtgaggtgtctactgagtgagctaactcacatatatggcgtggcgctctctgctggcttgcctgtcgtgactcctgatctgagccagctgcattaatgagtcgtc

SEQ ID NO: 8687 - DNA, 562 bp, Homo sapiens
tggccagattacgaagcgcaatgttgagattgagaatttgtctatagagagtacatattcgttcagcaccatgatcactctcatcaacgatgtttattgagaggatggttgtccaccttatacaggctcatggacctataataacgctttccaattctacacatacgtgtagacgaggtagtctatatactcagaacatctagcctgctctgtatctacagtgcatgagtaagtatatgtatatgtatgacatagaattccatatcgaagaggtcgtgcaagtacactggtgctgatgctgtggtgctcgaggaatatcggctgctaatacacgtatatctattgaattgtatcagatgatatgtcacatcagttgtgatcatcactgtcgtaggaatgttagatagaatattatatgtcatctctctatgactaggcttgtactcctggtgcataggatactgctgtgtgtggtagctgtccgtgcggacgctcgacatcactagagaatgcacggatagagtgtaagtcgagcagatggtagagatctgagcgcagtgag

SEQ ID NO: 8688 - DNA, 402 bp, Homo sapiens
tggggagctatggagtctggtatggtctttgagattccctgcttgagctgggaagggggtgggttctcgctaggtttaattgtactgcaacgtatcagagcaggcgccactagtcttagagagccagagcgtcatctgttgtagccactcggctcagacgtggttgtgtggaagcgactgtggatgacacacaaagtgtgcagtgttgtgttcctatgtaactttatttatggatcttgaattttgaatatatactgtacctgaccgggcggccgttcgacatgactactgaattcgctggggagtgtaggtcgactatatgtgagagttagaaacgcgttggatgaataatcgagtgtgtgatagtgatggctatataccgtggagtactcatggtagtag

SEQ ID NO: 8689 - DNA, 194 bp, Homo sapiens
aagctttttttttttttttttttttttttttttttaagtttttaaactttttatttgcatattaaaaaaatagggcattgcaataattaaaatcgtttgaacaaaaaaaaaaatgggactctgattaaactgcattacagcctggaggacaccttgggccagctgggcgttaaccaagatttcacgggccgccc

SEQ ID NO: 8690 - DNA, 194 bp, Homo sapiens
ggctgcgggacgtgatagacgattaaggtatgattgaataattatactgatatagtgtgtaagatctcttagagagagctgtgtaattattcatctatatatttttactaactaacgtgaaagaaaggatgctggatgagcttgttctgagagtatctacttgaggctgggatgatactccaagggttgatgag

SEQ ID NO: 8691 - DNA, 162 bp, Homo sapiens
gcgggccgaggatatcatgactagatttatatgtaatatttattattagggaaagttaagaaggaacagaagactagaaaagaagtaaaaactttgatgaagagaggggtgtaagaacaggatcaagacacattaatgcctaataccaacaacgagcagtgg

SEQ ID NO: 8692 - DNA, 226 bp, Homo sapiens
aaagaagatacaagctgacctgaataaaatttgtgcaggaggcgaagaaaataagggtataattatttggagaccatgggaacacgcaaacattatgcagaaatctatgttgtggataaaagtataaatgattatgatgttaaaaaaatggggattgaacataaaggacaagtgtgtgtgatgaaccacagaggaagtaaaagcttaagccatgaaattactaaaa

SEQ ID NO: 8693 - DNA, 194 bp, Homo sapiens
  misc_feature (1)..(194): n = A, C, T or G
ccgcgggccaggctactaaggtgcaagtatatgtaaattgttttgatacctttanagtgaagggagccttttgagaaaagttggtggagtgcatcgtatcataaagcgggtaggtagtacatgtaggcagtaaatattatttaaaaatgtggatagtatactgtgaagttggttggtctagaaataccagtttc

SEQ ID NO: 8694 - DNA, 242 bp, Homo sapiens
cacctgccgattgcctatgcccatgtgcctgcccttccgggggaacaaggggtcggtgggggatgacggcgatggaacggacgcacagaacgctagccgatgatcataacatcgttgatgagaaaaatgatatgcatgacaggagtagaggttggcgattgtattaggatcattgagatcaaaccacatcacccatgtgccacactgccacgactcataaagggtgttggtatgtggatggt

SEQ ID NO: 8695 - DNA, 402 bp, Homo sapiens
ccatgctatttgattttcctcatttcaactgttttgtatgaaaatcttaatacctatgtatatggtcctaactataggccgcacatttcttttataattcctgttggagagagaggggagggaaatttatgtgaatacctggtgaccttccttgactttccaggtttcctgatgtcattcattgattatgttctccttcattatttttatactaacttaaaaattgagtatttggagaaggttttatagtatttattgatgaatatatttagcatatcaaaatttttggttttaaaaactgagtaatattaaagactataagcaaacaaaatttatagaaccggtcattaagtaattgcttaaaacatggagcccattactctaacctttataaaaattaac

SEQ ID NO: 8696 - DNA, 274 bp, Homo sapiens
gagtacaagcttttttttttttttttttttttttgtattttattttaaagtattattatgaaaacacacaaaatcaaagagttatccatggatttgcaacagcagagaaacagtgacaagagagaccatcacccataagggggaacacttatccctttggcgttaacttaatataaaataattgggaaatgatcaccctaaatatcaatagacacgggcacataaaaaaaaagattaaaattaaagaaaaagggaccaggaaactggcgggaga

SEQ ID NO: 8697 - DNA, 770 bp, Homo sapiens
ggttttttttttttttttttttttttggttttgaacctttaataaaagtaaaaaatgaatgcaaaaagaacacaatgttgaaaacttagtatgaatgtgaacctcactagatgttcaaatctggtagagtgcaaattttgttcatactattttacatttttacaaactcaaatcactttggttcatatattttctataaactattggcaaaaaaatcctcaaatttacattcttttggctacattatttctaacagatatagatttacttccggtttcggagagaaagacttattgtgtgtgcgtgatcaagtctgttttaaagattcactcgctgctttcatctaataacttctgggttttcataaaatgctgacatcttcattggaaatttttttcatgtaactggtttcattttcagaaaatatataagggggtcattccaaagttcagaatgatcctatttttttaaaaaacaaaattcctgtaaaacaaattaactccaggaacttaaaatttactccaagacatttccctcaaaacaaagcaaaaaaccccagcaaagatcggtacatcacaaaaacaaacacaaagaccagcgctcacaggcaagttcctcttagcttccattctgctgactgggggcttccatttaaaaagaggcttttaatcaagccactttcacagaatttaaaacaaaacaaacacatgttaattgcaaaaaacaaaaaaggaaaattattagaaaaaaagaacaaaacccaaaaaacg

SEQ ID NO: 8698 - DNA, 178 bp, Homo sapiens
tagcctcagcggggaccctcagcacatgaatacttcctcattcctggccccctcccttggcccttctgcctctcttcactgccatacaattgtgtgaaggatgtagggaagtggaaggaattaaataaagaaggaaccagcggtgaaggcccccccgccccccacagactaggtcggc

SEQ ID NO: 8699 - DNA, 178 bp, Homo sapiens
aacactatgcattacatacacacaaacacacaccacagtcataaagccctaatgatgtgctgattacaggtcaatattcaggtgagcattctttattaatttatcaaatgaaaagctttttgctacctctgccattcatgaaagacagctatggaaaaaaggaacctggtaccaatat

SEQ ID NO: 8700 - DNA, 370 bp, Homo sapiens
tggctggactgcagtacagcggataaaacagggaaacgtaaaaagtaatcagatgactgttatcgagatggagagcataccagtaaaggtagcactgactgcaatatttgtaatataaatctaaagtttatatgttaatgaatatcaatatatatatggggtatatataattacactaatcagtgacagaagcacttataatagcgacttctgagtaatgaagaagagaaatgatgaatatatgtattatctatagggcctatatacggtgactgcctcactatgatcctatgggttgtgagtaattatgcaaggctgtgtgaatgcacagctgtatctgaaggggcaactacgcagtgctgcctaagca

SEQ ID NO: 8701 - DNA, 209 bp, Homo sapiens
gcccggaggatgagcatgagcataaaggaagtgtggtaggacagatcaaagggaagtacatggaatgtacgaggtttttcaattaggaatcaaaaaagaaacgaggagacttcgaaaagctgactaattattagggaactgacttggatgctgtaagcaaagctatacatgatctgatacaagagatgggcggactggcgttagcatgt

SEQ ID NO: 8702 - DNA, 322 bp, Homo sapiens
tgattacaaagctgtatgtcatgggccaactatgcaataaacctaaactagagctatgggctgtgagtggatttcacttgatgataccatgaagactgatttatgatgtgatactatccattcttctgtcggtatgaagttatgcatgacaaaatgatggagtgcttaaatgggatgtcatatggacaaagaccgtgtgaagtgaccctgatgatagcatatcatttcaggataactaatgactggcaggttgcaaggattgttgacgactgggactggacatgcgcggataggtgattgctcacggacatgctcgagaaaa

SEQ ID NO: 8703 - DNA, 578 bp, Homo sapiens
atcttggtgagaatctcagcaaaccaccaagtgatcctgaggctaaccctgaagtttcagagagaaagctgccaactgaggaagagcctgcacctgtggtggaacaatcagggaaaaggaagtcaaaaaccaaaactattgtggagccaccgaggaaaaggcagacaaagaccaaaaatatagtggagccaccaaggaaaaggcagacaaagaccaaaaatatagtggagccactgaggaagaggaaggcgaaaaccaaaaatgtatctgtgacacctggacataagaagcgtgggccttcaaagaagaaacccggtgcagcaaaagttgaaaaacgcaagactaggactcctaaatgcaaagtccctggatgtttcttgcaagaccttgaaaagtcaaagaaatactctggaaaaaatttaaagcgaaataaggatgaattggttcagagaatctacgacctgtttaacagatccgtctgtgataaaaagctgccagagaaactacgcataggctggaataacaagatggtgaaaactggtggcttatgcagcactggggaggagaggggggcccgg

SEQ ID NO: 8704 - DNA, 354 bp, Homo sapiens
aactggtgctgaagataatgacatcagcaaccgagactaaggcaatacgtcattgacaccaatacaatgagcctgtgtgtgatgggtctgttcgtgctagtgctcgattttggattttgatctctatcagtatcattgggcttggactctgacactgccagcggctgctgttacactgatagggagaggaatcggactggggaggtagaggacaatgacaacgagaacatcagctcctgctcacaggcggctgtggtaagcaaagaaggccacgctgtacgcactgtaccctgcgagcagggagtcctgcaggggcggcctgggcggtctactcatgaatctgaggtcgattgt

SEQ ID NO: 8705 - DNA, 226 bp, Homo sapiens
tggtattggtaataaaattttgatctctaagaagattaaaagaagtagggaagcgtgatgttagaagcgatggcgattttctggtaagcggtctatggtctgttttattataaactaggaaaagaacataacagctcacaggacccaacttattgatgaaatgaactggagtgctgacagatactagggatagaaatagatgaagaagggacggaaacaattacta

SEQ ID NO: 8706 - DNA, 498 bp, Homo sapiens
agcatacacggcagatatgcaccatgcaatgcccgagtgaagcactgcctgaggacaaagagggcttgaatgtcaggagtgtgtgatggaaggatggacggcgcggctgcgaagatgctgacagatggacagacccaccagaggaatgaggaggctgcaatggtcaagagagtatccggaacgatccagggcgaagaaacgccggctatgcatctgcattggagtggcacaggggtcacattgcatgcgagagacggtgagcgtggggagaaataagatcgccgtactggaaagatgctggaagagggccggaaaccatggaagtctggtgaggctgcaatggtagatgtggatcatggctagtccatgtgagctgagtagttaatcagactaggcacatcggggtcgcaactgctgtgcgtgatatgacacagacagttgctgtgggcgtactgaatgatgaggacaaagaagcggatggccctgataaagaaagga

SEQ ID NO: 8707 - DNA, 226 bp, Homo sapiens
tgtacacgggggtgtcttgcgcatgtccatcgggaggtagggggactgggtggtagcgcgagttatacacgatgaaggcgaactggacacgttaatgtgcttggaccccatgccgatcgcgacatacgggctagctggaggagggaaacggcgatgatggggcaggatgaaggggcaaaaataggggcgtggtgagcagaaaataactgctggccttattttatgt

SEQ ID NO: 8708 - DNA, 498 bp, Homo sapiens
ttttttttttttttttttttttttttttttgggtttgaacctttaataaaagtaaaaaatgaatggaaaaagaacacaatggtgaaaacttagtatgaatgtgaacctcactagatgttcaaatctggtagagtgcaaattttggtcatactattttacatttttacaaactcaaatcactttgggtcatatattttctataaactattggcaaaaaaatcctcaaatttacattcttttggctacattatttctaacagatatagatttacttccggtttcggagagaaagacttattgtgtgtgcgtgatcaagtctggtttaaagattcactcgctgctttcatctaataacttctggtttttcataaaatgctgacatgttcaatggaaatttttgtcaaggaactggtttcattttcagaaaatatataaagggggcaatccaaagttcagaaagatgctattgttttaaaaaacaaaaatcctgtaaaaaca

SEQ ID NO: 8709 - DNA, 162 bp, Homo sapiens
  misc_feature (1)..(162): n = A, C, T or G
cgagagatgacgttccaagacatctgagcancccgcggggctatacaaccatgtaaccaaagcctcaccccttcccgcagttggaaaaaaatttatggaacaagaaaagttatcatttgaaatttaaaagggtgggcagaacattggtcccaaggaaatatt

SEQ ID NO: 8710 - DNA, 194 bp, Homo sapiens
  misc_feature (1)..(194): n = A, C, T or G
tgaagactagataggagtggnaagactggacgtatgctctgaaggagcataggagacataagtaaaagcgggcagtaaactgtcgtctgatgattatgagaccatgggaaaaagcatgagacaggtaaaacatagtaatgggcatgttacaagccactgacgtatgcctgcactattgtacagcacctttcacc

SEQ ID NO: 8711 - DNA, 162 bp, Homo sapiens
tctttttgttttatttatgttgtattgtaagatgtcaaagagtaatacgcaaggcacaaaagatcatattgttagcttgtatggttgacagagacagtgaatattatcaaggaaacatcacatctgaaggacttagcattgcaacacacaatttataagaac

SEQ ID NO: 8712 - DNA, 210 bp, Homo sapiens
gctggtgtgttatttatttgtggtacatttagaggaaagaacggtagggagccatatatgacgaagagggtaagaaggcacatgtagtaagaagaataacaagtgacacgccacagtgggtcagtggcgcaagataacgcgagatcattaactgacatggtaacaatctggtacatatcactgtgtatacatggagagaaactgacgtga

SEQ ID NO: 8713 - DNA, 178 bp, Homo sapiens
cggttgtgctgttatttttatttttgtgtattttaagaatgcaaatatctgttaaagcgagcaatatatgatcaaagaaggcgaacgaatggtaggggcaggaggtagaatcaacaaggaccactgccacttggggatcagtggcgcaaggtaacggagctagattaacctgatatgg

SEQ ID NO: 8714 - DNA, 194 bp, Homo sapiens
ggtgggcgtttatttctttaatgttaggtttaagaggaaagtagctgggatagaaggcatgcataatacagaaggctatgaatgctatggcaagaagaagggataatacgtgcgcgtgccacatgggtgttaggggtagaagataaccgtgagcagaactgtatggtatagttggtccatagtctgcttattag

SEQ ID NO: 8715 - DNA, 514 bp, Homo sapiens
caagcccccgccgcacccacctccacccccccccaaaaggaaaaacaacaaggaagaacgtacccaggcagggccaccacaaaaggggagcatcaaccgagcccacgagcgggcaaagggaaacgagcggggcggggggagacggacagggcgccagacacaccaccagcagagcacagcagacgggccgaagccgggcccgggggccggcctggacacgccccccgggcgcaggaccccccgcccatgcccccgaccccgcccgccacccacgcggccggcggaccagcacagacccccaggccacggcggggaacaaaaccagcacaacccccgaggaggcagacccacaccaccgcccccaaggagcccccccggcaggcgccggccccgaccccgccaaccggcagcccgcgggcagcgaggctccaacaggcccccccacgcgacacccaccccctacaccccccaccaagcacgcagcgaaaaaacacacgccaagggagggcaagcc

SEQ ID NO: 8716 - DNA, 306 bp, Homo sapiens
ccctttctttttttttttttttttttttttttttttttttttttttttttttttttttttttaaaataaaattaaaaaccaatgaaatttattgggttacagggaataaccgggcacaaaatggtggaaaaaggggttaaaacaagtttacattaaaaatacaaacaactacggggggtgacaaatttggaagcggggggtacttaaaaaaacggcatcgaaaaacaaaccactaaaaattcgcgaaatcaaaaaaataacttctttcttctttaaaaaaggagggggaagaagtcgttgggttat

SEQ ID NO: 8717 - DNA, 194 bp, Homo sapiens
aggtaacaaggctcttttttttttcttttttttttttttttttttacccgtttaaaaataacattttttattatttccccaggcccgatccacagccctgaaacaaaagcattctgatacacatttgtcagtgctggggggtttggttgccatgactgcctacacaggcgcgatgaacagccaccccgggttgg

SEQ ID NO: 8718 - DNA, 242 bp, Homo sapiens
tgggcaaactgactggtgatggcaagagtggtgtctatgaagacggactacacagcatggcacatacaataaacactgcgagactctatgcgattacctggctactacacacatttatacccaacataacttcatgaattgatgccaccatgtgcaataaactgcgccgtctggtgctcagaggaacaccaggcgctgcaacctgcagctctatcaggacgcccagactccgccattagggg

SEQ ID NO: 8719 - DNA, 466 bp, Homo sapiens
tgctatcacaaatattctacttgtaactattcaactgcatcgctgacataacatggttgaacgattgggataatggcactaagcactaggtgtagatatgattatgactataatacatgggtaaaggtgctgataataaaacaaactctaccatactagatacactgagtcaatgtatatataatgtgggatacgataatgaactcacaactaatatggcagggacacatatatgaaacacaatatatcctgtatttgcgatataagcatcattataagatcataagtagattgtgcgaagaatcctatgtatgccggactgttttatcctgacccaacccatatgacttgtcccagtggatccgggagaagagatatgaatgacatgtagccggactgagcctacacagttacacccccgatatgaagggaacgaaaatacatcttattgcataagctccagcag

SEQ ID NO: 8720 - DNA, 450 bp, Homo sapiens
tttttttttttttttttttttttttttttttttttttttttttttttttttttttttttttttttttttttttttatttaaaagttttattataaaaacacagggaataaaggggggaatccaggttttgggaacagaaaaaaaaaagggaaaggggaccctccccataggggacacttatccttggggtaaactaaaaaaaaaaagggaaaaaacaccaaaaacaaaaaaaaagaccaaaaaaaaaataaatttaaaaaaaaaaacaggaacggggggagggagaccggggtaggggggaaaagggggcaagggaaaaacatcaaggctaggggggcctcccctgaaaaattgcgggcttggggaagtcaaggtcggtggcagggacaaacccgtgcccggcccgcgggggggaggggaggggaagggggggggggggcggggtgaggg

SEQ ID NO: 8721 - DNA, 210 bp, Homo sapiens
tgcaaatgaatgaaaatggtttaaaatagacacaagacatgggccaacatacgttctactgacgatgcagaggaactgggaccctacccagctggactgggaatgggaggggtgccgccatgctggaaagtggcgcgggagtggcttaggatgccaagtacatccttaccatgacatacaccaacgccactgatgagatgtgcacgaagg

SEQ ID NO: 8722 - DNA, 354 bp, Homo sapiens
acaagctttttttttttttttttttttttttttgctcacatttaatttttattttgattttttttaatggtgcacaacacaatatttatttcatttggttcttttatttcattttatttgtttggtgctggtggtttatttatttttactgaaagtgagagggaacttttgggggcttttttcctttttctgtaggccggcttaagctttctaaatttggaacatctaagcaagctgaaggggaaaggggggttcgcaaaaacactcgggggaagggaaagggggctttgttaatcatgccctatggggggtgagtaactggttgggccctgccgggggcgcgggggggggcgg

SEQ ID NO: 8723 - DNA, 162 bp, Homo sapiens
gttggccccgtaggttactagtctagtgtcttcagtatgtaactactgtgacctcatgctggtcaagggtctaagtttaactagcaactatgtattccagtaaaatcagatgtaaagtatactactttggtactaggtacctaagtaggtcactttcacttg

SEQ ID NO: 8724 - DNA, 354 bp, Homo sapiens
gctgcagtgacatgagacagaacagcgcggagggcgccacaaaagcagcggacaagaaagccgcaggagcaggcaaggccaccaagccagcccagaaagcccagaaggccaaacgaacaccaccccaaacaccagccaccccacacacaaacagcggaggaagaacggtctcagaaccgcaagcatcaaccggccatacaagaagagcagcaaaagacaggacaacgacaacaacgcatcgcaaaacccccagaaggaaaggagaacgccgcgaggaccaccccggcaaccccactcgcgtgcggcagcataaagccacaagtaaccaaaaccagtacgctgccgggactgcaa

SEQ ID NO: 8725 - DNA, 578 bp, Homo sapiens
ctggtctttgtgtatggttttgtgatgtaacgatctttgctggggttttttgctttgttgtgagggaaatgtcttggagtaaatgttaagttcctggagttaatgtgttttacaggaattttgttttttaaaaaaataggatcattctgaactttggaatgacccccttatatatgatctgaaaatgaaaacagttacatgaaaaaaatatccaatgaagatgtcagcattttatgaaaaaccaaaagttattagatgaaagcagcgagtgaatctttaaaacagacttgatcacgcacacacaataagtctttctctccgaaaccggaagtgaatctatatctggtagaaataatgtagccaaaagaatgtataattgaggatttttttgccaatagtttatagaaaatatatgaaccaaagtgatatgagtttgtaaaaatgtaaaatagtatgaacaaaatttgcactctaccacatttgaacatctagtgaggggcacattcatactaaggtgtgaacaatgtgtgtctttttgcactcattttttacgttttattaaaagagcaaaaaacaaa

SEQ ID NO: 8726 - DNA, 498 bp, Homo sapiens
  misc_feature (1)..(498): n = A, C, T or G
ctgatattgtgtagacgaaaagatgatctgcaagatgataaagatctggaatatggccataaactgtagaanggtggtgaagctgtcattgctgatgatgctgccgtcgagcacatgggtgctgacgagcccatatactatgcaaccttgtgacactatgcagcttcggatatgatacatacacgtgatgtgagagacacaaaagcagtggacgagatagcagcagggagacggcaaggctgccggatctggccaggacaccaagaatgctcaaagaacattatacgctatacgaatcacatcactaataaccaccggcggaataacagtcacaggagtgagaactgcaatagaacagttaggttcaataggccaatacaggttaatgataacaaagcgtcgtatgaccacaatacagaaaagaaaatgcataatgaaacgataatgttttgtggaccacgtgtggtagctttaatgcatgaggcagtaatatcagat

SEQ ID NO: 8727 - DNA, 162 bp, Homo sapiens
aatgctcaacgcattacattacatgaactcacccatgtgatggtagtaactgttcttcatcactaaaacatggaagcgaaaaatgagtcagatgctgtttcgaggctcgaacaccatcccagcaatggtagccctgcctgcaatcttcgactttaataccca

SEQ ID NO: 8728 - DNA, 258 bp, Homo sapiens
gtagagtaggacagagacaagaaaaatataatgcacacacacattggatggttgtacttgcaaactagctaataacactagggaagaacaaaggatccaaaagcaggtggagagcataaaagaacacatgaatgggaagtcctgcaagagctacatgaatatacgagatgactctataaaagctgactaatcattatgtatatgactggaatgatcaacacacagaactacatgaaactcatccattgtaggctgatc

SEQ ID NO: 8729 - DNA, 194 bp, Homo sapiens
atggatgttaattgaataatgatggtaaaagggtagattattggttgtattttgattgatgttataatgaggaggtttgtggataggagtgaataaagtgattggatgagtgggcgaaatattatgagttgatgatgggatatatggaggatggggataagtggagaggagaagatgggaaagtggagggaaaa

SEQ ID NO: 8730 - DNA, 402 bp, Homo sapiens
gtgcaccgagacgcgcggaggcagaggctcgggtgcgtgcaagacacaactacaccggtagcaccaccgacatgagccgaagaaggcatcgtgactggacgtgtaagggaggtaaacactgcgtccacaagaggatgtgaaaactgcactaaaacacagatggcacgaccacgtgaaataagatatgatgacggacacttatacaagcgacaatggcaactccgtgtactagcatcgaagtgaggaagagacgtatgtatgaacaagacagtgctggtaggacggactgagactgaacagacactatcatactatctccaagggcgatgacgacaagaaacagggagaatgagatatgacttagttaactggacagaagggggaaaacaagtatatggtcgg

SEQ ID NO: 8731 - DNA, 498 bp, Homo sapiens
  misc_feature (1)..(498): n = A, C, G or T
tacactaaatacaaagtgacaagggtgtctgtgtgctatgctcactacaacaaacccttcacctaaaaaacaaatggaagaaaaagagaaacagctgcaaatagttaaaagcactatagtaacacataacaaaatgtgagagatgagagaatagaaagagtagaaaatataactacttgctgtgaacctatggtagttacgctctgtcagtctgtagcatacataccataccatataaacacagcacaagagtaagacaacaacacatggtgaagctagactatgtgcaggatacatgatgcgtgataacatctgcaacatgagacaaacgtagaagagaactgaggcaataaataaaagtgatacctatagacggatacagtgatataacgttgggacactgggtggaagcgcgggataggagcggtatgtgcatcactgctgagcacactaatatgaatgtagtaaatggaccacgtccagggtagatgactgnag

SEQ ID NO: 8732 - DNA, 178 bp, Homo sapiens
ctgtagtttaagatgttagacaccagactctcacgcttgatccaaacatctttactcaaccacacaacaaatgaggtaatatctgtgtgtaagtttcaccttttgtcatttaccttctcctctcggtaaaaatgtaaagaaaaaagtgtatatgcttctccttgctccactgtaaata

SEQ ID NO: 8733 - DNA, 210 bp, Homo sapiens
tgttatattagtgatagatatctattatagattgtgaatcaaaattatgaatcttcagattgatgtggttgtcgtgaatatggttcagaagatgtcgataagtagtaggactgcaagtttaggttacttatgctaggactgatgtttgtttgaatatttgtaagtgcttggttattgaaagtgattgcctttaatccaagacttatagtg

SEQ ID NO: 8734 - DNA, 338 bp, Homo sapiens
aggtactttatgaatatgccagaaatatgttacataagcaattataagacgtgcaagtatggaatggattacctcgtctccgctcaaaaacactgatctctgaaggaagatggatttatatgtggatatgcaagtctgatcataaggttcattgtgagatgatggggaacatgtaacttagttatagagctaagaggagttattgtgcagtgtggagtactcaagctttcttatctagatgtactcagtcatctggctacctcggtgcgtgaaccaatctaattattaatggattagcggccgtctggaggtcgatcatataggagaagtccgtgcgc

SEQ ID NO: 8735 - DNA, 210 bp, Homo sapiens
ggcccgggggcaaggtacctaattttggctttcatggatttacatttttttaagggggcgtttaaggtgaatttattgttatttaataatgtcctggagataactttggggtataagattccaattttaatgtaattacctactattatttttgtgttgtcgttttgcaaagaaagataatgattcctgggggcttggggaaatattaat

SEQ ID NO: 8736 - DNA, 258 bp, Homo sapiens
tacagctttttttttttttttttttttttttggttttaagttttattattgaaaaaacaaaaattcaatggtttattcatgtttttggcaaaagaaaaaaacaggggacgggggaccttcccctaagggaaaattattctttgggttaaattatattaattatgggaattgaaacttattaaattaaccgggaaattaaaaagaattaattaagaaaaagggaaaggaacgggggggaaggggtcttgatttgtggga

SEQ ID NO: 8737 - DNA, 370 bp, Homo sapiens
gtatacgtgtattatttgtttttgttttgttctgtgggaatgaagaaatattttagtaaagtgtggggagcgggatgatgttcaatctcacaacttttggaaatgcttcttggtgctgtcagccgttggtgatctttatcttatttaaatgcactgtattgtgcagaggtctggtctcgcgtgttgtgaccattatttatatctggatatccctaagataggtggacaggtgtgcgtgtggtggcggtcgctctatctctgttgtggattatacgtcggatgcagatgagatatatgggtgtgctcataatgcgttggatgcataacatgagtattatataatgtaaacaaaatagcttggggtcggtat

SEQ ID NO: 8738 - DNA, 386 bp, Homo sapiens
actgcacactgatctgtaactcatcgcatgttgttattttgttttatcttcataccaggtcatattatctttatgaacagactggtgtatctactaaaaaatatatttatttctgagagctatgtttttggctgggaggagtgatatctcttcatacttaaatgttttattatatgcttaattattgtattctgggtgtttggttgtatgtacttgctgcgaggtggtgctgagatgtcactactgggtgcgccgctgcatgtcagtcgaacatatgggagagcttgcaagtcgtcggttggatagctctactattctatagtgtgaatataatagctgtctataatcgtggtcttaattgtttgctgttgtgatattgttttcct

SEQ ID NO: 8739 - DNA, 258 bp, Homo sapiens
tggcgcctcgggtagtgatccatgagaaagccatgtcagttcgaacgatagatcgttaagactcatgagagaaactgacgagtttaatctgaatctcctagttctttggagatggagatgaatcgtgaatacagctgagatctagtagatattattaggtagcaaatgaaattgtagttggtggtggttggaatgctataataatctttgttctccgtgtctcagttgaaatctttacacaaattataaggctgggtg

SEQ ID NO: 8740 - DNA, 386 bp, Homo sapiens
aggtaggagcattgtgcccattatttcttatggtcgatagagggttcagggggtgctaatacggtatataccggccgtatcttcatgatggctaaggaaagttatttgaggaatatcgagcatgaacgtgtgttttgttggggagatactgtaccattgagtgtattttactgacgcggctgtgttctgatgaaagtggttgggtatttacgtcttggaaaagtgtttgtctttcaatctgatgtgttgccagctcatatgtgcgaggtgttgtgctatgtgttcattatcagaatgggggtttccatatgccatatctgacgtggtggcctgtctatatcaatgaatgtgtcgcagctgaatgacacgttgaaaatattggagag

SEQ ID NO: 8741 - DNA, 386 bp, Homo sapiens
aaatgtttgatctgttattgaattgatctgtacagagtcatgatatttttttggtatgtatgagtaacatgaatgcttctgtatgaaacagttgttatatatactctagatttatatactaacattctggtttggctatttatgtgatattgatggtgttatatattatagtattatgtgttcattccataaattttatgaatataaattcattgatttctgtcttctatggtgatggtgggtgactagtgtttggatggagtctaatattaaatgattgtagcgattgattatgtatggaattaatatctatctcatataagacgcaaaaaaaacaaggaaagaataataccaaatgtagtggaggaagagggagggaacgaaag

SEQ ID NO: 8742 - DNA, 322 bp, Homo sapiens
gtacaagcttttttttttttttttttttttttggtttaaaatttttttattaaaaaaaaaaaaattcaatttttttatcaatttttttgcaacatataaaaatcatggacgttgaaccatcccaatagggaaatcttttctttgggttaaattattttaattatgggaaatgatatttattacaataacaaggaatttaaaaaaatataattaaaaaaaagggataggaattggggaaaggattctttattttggaggaattgtgtctcttgtaaaagcatccgggttcaggcaaccttccttgaaaatttcttgtttctaa

SEQ ID NO: 8743 - DNA, 386 bp, Homo sapiens
taggtatcgtgtgtggcgctgacgtcctcctctgaagcatgggatctctgatttgctaggtcctggttgcttcagttgcctgattagtctccgaggccgtgttagcagtcagtagatgtccgtactagatcctgtgaggtagggtggtgggtactgggagatgagtagatagagatgccagtaacatgttgtcttcctaaacaagagaggtcgggaggtatgtgtgtgggggaagtgaggagtgggtccagaaatatgtcagagagctggtgttgagtgactgatgggtataaagatgtaggtgtaagactcagggtgtcagtggggaggagcacgagcctgagctcgtggggagcatgacgtgatgatcgtcgtaggagacgtta

SEQ ID NO: 8744 - DNA, 594 bp, Homo sapiens
ggtactgattttggatttttgattttttttttgggtgtgaacttatacttgattgatatatatcatatatagataatttgaacatatgatttactatccattgtgggttgatgtatagattgtcaacttatatttggaatgtaataagtatgtattcttctgttaatgctatgttctcctggtgttcatctgacacatggaatttgtgtctgatgtgccattagagcggtgtctcatattgtccgcatatcttgatcgaggtagtgaattggatcgtatcttttgatttataagtgttcattgtatgattctgtgagttatacataccacggatgggatgttgcttatgttggctgcctatttggtctgtgagattgagcgtttttatcacatacatttgcctaatttgtcataatacaatggattagatgacacctctgtcgcgaacattcttatctgtattgtattcgtggtggacttcacgtcgaatatgtgggagatctcctatcgcgatgagatgtgtagcttgatgttgctatagcggtccctaaatggctcgacgtcatcattatcatggttgtttccagggtgtag

SEQ ID NO: 8745 - DNA, 514 bp, Homo sapiens
gcaggtactgattatggagtcaatgaatatatggaagggtcattcatgatatatgatgtaggatggtatgttttcatatggatcaacgtagaatcattcaagttatgtatggtatgctgtgtatacaatggctcatatagtgagatgatatctataaatgtatatgctgaataatattactttatgtttttatgtacattgtttgattaggtgaaataagtacataacgcatgggatcttgcgtaggtcggctgtctagatggactctgacataaagtcttgttttcggatagcatagattgattagtggcatctaataggattatctgagacagtcaggggatataggattcataaatcatacttgtatctagtcatatgcatgcttatctacacaaaagtagatattatatatacttatctgattgatgagatctctcatatctctcccatatttattatgttgtatatcaatttatggatttttatctggaatttgaagatagcacgttcg

SEQ ID NO: 8746 - DNA, 306 bp, Homo sapiens
agtgattatggaaacatgaagctatttaagggtttattacccctaaaggaatggaaagtaatctataatatggataaaagacatttattaaaaaaaataattgttgtctgtgtatagaaaagcagcttacaatgaatatgttatcaataaatatctatgcttagaaagtgcaaccttcttggtcttataaacaaaaagtgggcattggttatcctttgataacttacggccagggggttcattaggaaatccaccccatcatgatggaagtttggcggccccatcttccgttatggttaaaaaaaa

SEQ ID NO: 8747 - DNA, 430 bp, Homo sapiens
aggagttcatcagcggtcagtctgtggtgtttgtggccattgccttcatcaccatgatgattatctcgttagcctggctaatattttactatatacagcgtttcctatatactggctctcagattggaagtcagagccatagaaaagaaactaagaaagttattggccagcttctacttcatactgtaaagcatggagaaaagggaattgatgttgatgctgaaaattgtgcagtgtgtattgaaaatttcaaagtaaaggatattattagaattctgccaatgcagcatatttttcatagaatatgcattgacccatggcttgtggatcaccgaacatgtccaatgtgtaaacttgatgtcatcaaagccctaggatatgggggagagcctggggatgtacctcggccggcgacacgctaatgactagt

SEQ ID NO: 8748 - DNA, 178 bp, Homo sapiens
cagtcagtttacgagtgtttctagattaggttgtataatttatgatggattggcagaggtgcatacattaaatgtaacttgttttttgtcctctcccattatacataatggagtgatgatatactgaatgtgtgggaagaataatgaaagagattgaatttctacatctagtgcatca

SEQ ID NO: 8749 - DNA, 194 bp, Homo sapiens
tactaataatggtgttggcttagctatgatggattcaacatgaaaaatgtgaagctgtgataggtcattgtaatgtaaaatttgttaagacaacaacatcagtttttgggcggatatgatatttattgtgtaaatttgctgatggaggacaggaccagagacagaatcagcaatatacatgctatagggaagga

SEQ ID NO: 8750 - DNA, 402 bp, Homo sapiens
aggtgcatgctggatgataggatgaatttgaatgaatggtatctcctgagaatgggcagacactagaacatgaccttctggacttacagactggcgatgtgaatacaaaataatgtgtcgagatgtgatcgacaatggtattccactgaggggtactacagtcagacaagatatgacgaagatgtgtgagggagtggggaggaagatgagaaagtagtggtattatccgaacacagtagaattggtgcaatttgctgatatgaaatggtggatacatgctagattcaagtgtgatgagaattggtactagggatggaaagtcactgctaagattgcaagtgagtgagagtggtgagccagatgctctggactgcgtcataacatggacttgtgcaaatgata

SEQ ID NO: 8751 - DNA, 162 bp, Homo sapiens
cagaattatataatactaatgcgtatgtgatgtgagacggtagctgctgtcagacggcatcactgtgaattcagatgcaaagaggaactgttgatcttgatgcccatacctctgatcagaatcttgacatactgtcatgagacactatagggtacgttatca

SEQ ID NO: 8752 - DNA, 194 bp, Homo sapiens
agataactatgggttaaaagagagagtggattttttatacatgattggatacagtgggattgaccatcagctgactaggagataatataacaggctgttgaaagtgattgttttttgaagatagaggatatgagattttctgctgatcttataatggtgtgatgtctgatatcttgtgttcgctgttattgtta

SEQ ID NO: 8753 - DNA, 162 bp, Homo sapiens
acacactgccactggcttttgctgtccacggccatgacagaccgacgcagcgagctttctctcaaaagcaatgcttaaattttattcataatatactgactgcaacaacatcatgaaaatacaaaaaaaaaaaaaaaaaagacttgtacatgaacagaggcg

SEQ ID NO: 8754 - DNA, 466 bp, Homo sapiens
ggtcatacaaagagggcactacaccagcttcttggcctcaaagaagctcttgaggtgacgcatctgccagatgccagtgaggatgaggatgacagtctgagcaatggaccaccataggtacctctggttggtgctctcgctcgtcagtcggaagcgctcttcacgatacctttggtaatcctgctccttctgaatctgttccacctgatcaagcaactggcgggagcggagctgtagctccgacagattatcttttgaagaaatctcagggtagtagtaggaatgctccccaaactggatgtagagatgacaccgaagtttgacaacagagaagagagccatcctgatagaataggagtgaagacagatatgatggtcaccgggagtgtgggaggtgaaagtgaagaggaactcagagcagataatgaccgggaggaagaacgaaataaatagagaataagaagac

SEQ ID NO: 8755 - DNA, 496 bp, Homo sapiens
gagtgagcctcctcacccctctctgctctgctgatgggggcttttggacagcaaggcatagagcagaaaacgtgaacactgctacccctggtgaaaaactgtgtgaccttgagcaagtcggtctcgctcagtctctttcctcagctggggataaaattcctacttcacaggactgtaaagattaagcaaggcaagggatatgaaagtgcttagcacataataggggaacaatatatcctgtatctgagtatggataggagtgtggagatcatccaggttgagagggagaagagtggattaaagacagtcagtgggattaagtgtctaccctgaccttgcttctctacatttccttttcatcttgaaagaagttggaggtggcaaaaatattaagaaggtggatcagaatgacttggggactgaaatttgtgagggaagagacaggctgtgcaccttctagaatggatttatctcttttatgactaccaagaaggga

SEQ ID NO: 8756 - DNA, 258 bp, Homo sapiens
cataggtgcttactatactgttttgtttctgaatttggaatttctcaaaattaaaaaaatatctactgaggagcttttcgttttaactggtggggaatgggttctgggtggttttgccccttgtttttttagattcaagaaatccatggtgaaaggtttggtattctatgaagaataggaggataaagtgatcaaggagatggcagctcagatgcgcgaggtggagcagagccgacaggaagtgggcgtgtccgctct

SEQ ID NO: 8757 - DNA, 551 bp, Homo sapiens
  misc_feature (1)..(551): n = A, C, T or G
aggtacacattgccatgagatggcactttctgaggatactcactaaaactgagtttcttcattagaaaaatctcactttttatcatcatctcagtgcctggtattggtgcccttangtctgtgaacagcattgcgttatgccagtaaatgaatacttaaatcaataattgcattctcagcagtcctcttagtctttgtttgtttgtttgtttttcacagttgaattgcaatgtagctgtttggcagaggcattaacatttttgccctaaccctggcctggtgcctangctcaggggagtaaaattagagccaggagccagngagctgaggagaccacttaaaaggcatgctagcatttgataagtaaggggttactttgtgaggaaaagaaactttatatgctttaagcaagcctctttatgaggaagaaaaggtcagctactgaagcggggtcccaactactgctgggtctgtagaggagagagacacccccaaaatccagatgttttagttaacaatcagacacagacttgtctctggtttcttacagg

SEQ ID NO: 8758 - DNA, 466 bp, Homo sapiens
  misc_feature (1)..(466): n = A, C, T or G
cgggncagnntacatggntgnantggagncctnncctccacccctctctggctctgnctgnnatgggggncttttggnacagccaaggncataggancaggaaaacgtgaacactgctacccctggtgaaaaactgtgtgaccttgagcaagtcggtctcgctcagtctctttcctcagctggggataaaattcctacttcacaggactgtaaagattaagcaaggcaagggatatgaaagtgcttagcacataataggggaacaatatatcctgtatctgagtatggataggagtggggagaatatccaggttgagagggagaaaaatggattaaaggacaagcagggggattaaatgtttaacctgaccttggttgtgtatattttgttttgaattagaaagaaattggtggtgggaaaaatattaggaagggtgaacagaaagacatgggggcaggcatatgt

SEQ ID NO: 8759 - DNA, 450 bp, Homo sapiens
tgatttctaaagtaagcctcagaatttccaaaccaattcatccacagctgtttctgggctggttttaaagtagctgctacagaatcatgaggctttccctttttatcaaatacgaaaaacatttttaaaattctgcacacccagtgatcatcttttgtgcgggaaagcaagatgatgatggatgattttattcatccttttagtaaagacacaaaacatttttctcaacatttgtacagttctgaaaaaaacctggtcaccaaaaatatcttctctgctaattcagcaattcttgggctccagttaggggagctgggggctcactttctcccaggattgtgggcttctctggaagtgaagggtgaggaatgagtggggtgtcgagcccagccctggctgcctgtgggtttgggggagggagcgagggatgaggtgccctggcagatggca

SEQ ID NO: 8760 - DNA, 530 bp, Homo sapiens
gcagcttccccgagctgatgccattcgttcacgtctcatcgatactttctctctcatcgagcatttgcaaggcttgagccaagctgtgctgcgacacactatcaggagttacttgatccttcccgccagaagaaacttatgttgggagatcaacaccagctagtgggcgtctctataaagcctcaacgtatagaacagatttcacatgcccagaggctgttgagcaggcttcatgtgcgctgcagtcagaggccacctctttctttgtgggccggatgggtccttgagtgtatcctttcatgtcactcatttttatcctggctgttgatcatctgcctaatgaattattttttgcttcccaaactccattgtctcattctcaatgcttatgttattgctcttattatttccgctgcataaatcagaaagaactcaaaaaaaaaaaaaaaaaaaaaattggggggcggaagcttattccctttagtgaaggttaattaaagcttgggactggccggaggtgtacaaagtcg

SEQ ID NO: 8761 - DNA, 690 bp, Homo sapiens
  misc_feature (1)..(690): n = A, C, T or G
taagcgtgtccagaattggtgggtctcactgacttcaagaatgaagccgcggaccctcctggcggaattctccacgagttttgagcagcctcggttttcccaccacctccaaatcatgcaagacacagggtaagagcaaagacaatgtggctgtggccgatgtccaccctctcggggcgtcccttctcttctctcctccttgagcagggagaccatcggggtgcaacctggttggggcggggaggaggtgcagggcctggccagagcgggcctggccacgggcaagggacagcgacccccgggccaggacaggtgagagcggcgcaggcccgggcccggcgtggcggaggtgcgcgtgagcggncagcagagggcgccagagagccaggagcggcccgcagaggagcccgcgccggccccggtgcccacctccgcgccgcgcggaccctccgagcccgcgctcagacgccccagctccgccgagagggcgcttgcgccgggtccttctcccccaaatgcaggcagagcccccggagccatgggcaggccttccggcagctccaaagccactggcaagccccgaaggcaggatggccggcccaggagggaggaggacgacgtcccctcccgaagagaagaagctgcggctcttgctggtaggggggaagcgcacagccccaggaactggaa

SEQ ID NO: 8762 - DNA, 418 bp, Homo sapiens
atagattttcaaaatgtctaaaaagtgcagtttgaattgttacatgttaatacacagttgctttattcagatgtgtttgtgttgacggactaacagtgccttctggatctgtgcaaataatggtacccctccctgcaaagaaaaaaagagtcattaaagcactacaatattacacataaactgatccatctaggtcagctttagtcaggaccggagaatcagcaaacataagaaaaacaaaacctaggaatacatacaaaagctctcatggggtgctagaaccctcttagactggtgatgtatgtggagggcattaagagctggaaaggcgtatatgggtaactaccgttaactatattctacagcaagggctgggggggcagaacaaggtgaaggtgggtggttattagggttggga

SEQ ID NO: 8763 - DNA, 632 bp, Homo sapiens
aatgaatgaaaataaagttttacctcccaagtcaatttcacataattctaattccttttaactagagaatatcttgtttagaaggatcattaagctaggtcaaggtaaaaaacaggttataagacaaatgcatatgaaatctacaacttataaggaaagaaaataccaaattagttctatcagtcctctaaactacagaagaacattatttttacctagtgtgcatgtacacacacacacacacacacacacacaaatatttaatgcttttaagtacatttttaaaaaaaatctaaacaatactttgactagtcttttcctcctaatattatatatagactgaagtttttgaaaataaaagtagctgagccaatgaaatgctttagcattgtatttttaccatcaagcactgtttagcaggctgtatttcccacttttcttcattgatatcaggagcaagcactagaaatatagaaaataaatataaaataatcacaagttcttaaccttatttttttcagtctttatcagcttcacgtagagagctgctcactgtgttatagcactttttaagttgcaaagccttgtcatatacattataatttgtattcctctaagcaagtcaaggggcg

SEQ ID NO: 8764 - DNA, 450 bp, Homo sapiens
tgcagacctcggaagggagcggatagcggcacccggagccgcccgcagagcaaagcgcggggaaccaaggagacgctcctggcactgcagataacttgtctgcatttcaagaacaaactaccagagaccttacctgttcacttggctctcccaaccaatggagatggctccaatggtggcacaaaccagggaagggaaatctgaggtttaattcctttatgcctcattctctgagtgctgaaggcttgctgtaggcctgtatgcctgttaaatgctaaattgtgataggggtttttgccttccaatgaactcccacatatttacattttaccagtgtatgatgccctgttactagcattgacatgggaacaaaattgctgccggggggaggatgaacaaagaaagtcatgaagttaccccttgtctgggataaaactatagtactttcaa

SEQ ID NO: 8765 - DNA, 562 bp, Homo sapiens
  misc_feature (1)..(562): n = A, C, T or G
ggggtaccattttacacacctccgncggtggnaaatccttgnaaagnaaagcagcaccagctgctgactgcaggcctctctgccacctctgcctgcccgcctcactgactgcttcatctgccagcctcgcatgcacttctgacaacacacctgtccatcacagacactgccagctgctctgtgtgtatccatgtgtgtgagccagtggtgctggcgggcagcggaacgatcgtccgtgatgctagaccgaacatgcacgggcacgcatctcctggcgtgtgagtggaggctgtcagaggggcggacgggagtgagggcatgtgtctgcatgggactgatagggacagagaaacagtggcagacttgggcgatacatagctcaccagacaaacatgcaccgtcagatagatagagggtagaaagatcagggagaagagagagcccagcaaacatgcacaccangcagtggcgggagaggcacgctcactacataggaagaatgaacagacggcacacgcacgcagggcatggactgcagcacatctaaccaaccatgcctaga

SEQ ID NO: 8766 - DNA, 594 bp, Homo sapiens
  misc_feature (1)..(594): n = A, C, G or T
cattgccatgagatggcactttctgaggatactcactaaaactgagtttcttcattagaaaaatctcactttttatcatcatctcagtgcctggtattggtgcccttangtctgtgaacagcattgcgttatgccagtaaatgaatacttaaatcaataattgcattctcagcagtcctcttagtctttgtttgtttgtttgtttttcacagttgaattgcaatgtagctgtttggcagaggcattaacatttttgccctaaccctggcctggtgcctangctcnagggagtaaaattagagccaggagccaggangctgaggagaccacttaaaaggcatgctagcatttgataagtaaggggttactttgtgaggaaaagaaacttttatatgctttangcaagcctctttatgangaagaaaaagtcagctactgaacggggtcccaactactgctgggtttgtagaggagagagacacccccataatccagaggttcagttaacaatcagacacagacttgtctctggtttcttacagggtgacagcagtattcgctattttgagatcaccgatgaaaaccccggcaccc

SEQ ID NO: 8767 - DNA, 754 bp, Homo sapiens
  misc_feature (1)..(754): n = A , C, T or G
actatatttaggcaccactgccataaactaccaaaaaaaaaatgtaattcctagaagctgtgaagaatagtagtgtagctaagcacggtgtgtggacagtgggacatctgccacctgcagtaggtctctgcactcccaaaagcaaattacattggcttgaacttcagtatgcccggttccaccctccagaaacttttgtgttctttgtatagaatttaggaacttctgagggccacaaatacacacattaaaaaaggtagaatttttgaagataagattcttctaaaaaagcttcccaatgcttgagtagaaagtatcagtagaggtatcaagggaggagagactaggtgaccactaaactccttcagactcttaaaattacgattcttttctcaaaggggaagaacgtcagtgcagcgatcccttcacctttagctaaagaattggactgtgctgctcaaaataaagatcagttggaggtangatgtccaagactgaaggtaaaggactagtgcaaactgaaagtgatggggaaacagacctacgtatggaagccatgtagtgttcttcacaggctgctgttgactgaaattcctatcctcaaattactctagactgaagctgcttcccttcagtgagcagcctctccttccaagattctggaaagcacacctgactccaaacaaagacttagagccctgtgtcagtgctgctgctgcttttaccagattctctaaccttccgggtagaagag

SEQ ID NO: 8768 - protein, 730 aa, Homo sapiens [sequence omitted]

SEQ ID NO: 8769 - DNA, 674 bp, Homo sapiens
  misc_feature (201)..(201): n = A, C, G or T
  misc_feature (477)..(538): masked repetitive sequence
taaaagcaggctgtgcactagggacctagtgaccttactagaaaaaactcaaattctctgagccacaagtcctcatgggcaaaatgtagataccaccacctaaccctgccaatttcctatcattgtgactatcaaattaaaccacaggcaggaagttgccttgaaaactttttatagtgtatattactgttcacatagatnagcaattaactttacatatacccgtttttaaaagatcagtcctgtgattaaaagtctggctgccctaattcacttcgattatacattaggttaaagccatataaaagaggcactacgtcttcggagagatgaatggatattacaagcagtaatgttggctttggaatatacacataatgtccacttgacctcatctatttgacacaaaatgtaaactaaattatgagcatcattagataccttggccttttcaaatcacacagggtcctagatctnnnnnnnnnnnnnnnnnnnnnnnnnnnnnnnnnnnnnnnnnnnnnnnnnnnnnnnnnnnnnnactttgggattcctatatctttgtcagctgtcaacttcagtgttttcaggttaaattctatccatagtcatcccaatatacctgctttagatgatacaaccttcaaaagatccgctcttcctcgtaaaaagtggag

SEQ ID NO: 8770 - DNA, 1010 bp, Homo sapiens
  misc_feature (1)..(1010): n = A, C, T or G
cggacaggtacctaaaagcaggctgtgcactagggacctagtgaccttactagaaaaaactcaaattctctgagccacaagtcctcatgggcaaaatgtagataccaccacctaaccctgccaatttcctatcattgtgactatcaaattaaaccacaggcaggaagttgccttgaaaactttttatagtgtatattactgttcacatagatnagcaattaactttacatatacccgtttttaaaagatcagtcctgtgattaaaagtctggctgccctaattcacttcgattatacattaggttaaagccatataaaagaggcactacgtcttcggagagatgaatggatattacaagcagtaattttggctttggaatatacacataatgtccacttgacctcatctatttgacacaaaatgtaaactaaattatgagcatcattagataccttgggccttttcaaatcacacagggtcctagatctgnnnnnnnnnnnnnnnnnnnnnnnnnnnnnnnnnnnnnnnnnnnnnnnnnnnnnnnnnnnnnactttggattcttatatctttgtcagctgtcaacttcagtgttttcaggntaaattctatccatagtcatcccaatatacctgctttagatgatacaaacttcaaaagatccggctctccctcgtaaaacgtggaggacagacatcaagggggttttctgagtaaagaaaggcaaccgctcggcaaaaactcaccctggcacaacaggancgaatatatacagacgctgattgagcgttttgctccatcttcacttctgttaaatgaagacattgatatctaaaatgctatgagtctaactttgtaaaattaaaatagatttgtagttatttttcaaaatgaaatcgaaaagatacaagttttgaaggcagtctctttttccaccctgcccctctagtgtgttttacacacttctctggccactccaacagggaagctggtccagggccattatacagg

SEQ ID NO: 8771 - DNA, 21 bp, Human cytomegalovirus
atgtggccgcttctgaaaaac

SEQ ID NO: 8772 - DNA, 19 bp, Human cytomegalovirus
tcatggggtggggacgggg

SEQ ID NO: 8773 - DNA, 20 bp, Human cytomegalovirus
gtacgcgctgctgggtcatg

SEQ ID NO: 8774 - DNA, 21 bp, Human cytomegalovirus
tcataccccgctgaggttatg

SEQ ID NO: 8775 - DNA, 20 bp, Human cytomegalovirus
cacggacgacgacgctgacg

SEQ ID NO: 8776 - DNA, 21 bp, Human cytomegalovirus
gtacggcagaaaagccggctc

SEQ ID NO: 8777 - DNA, 22 bp, Human cytomegalovirus
caccaaagacacgtcgttacag

SEQ ID NO: 8778 - DNA, 22 bp, Human cytomegalovirus
tcagacgttctcttcttcgtcg

SEQ ID NO: 8779 - DNA, 21 bp, Human cytomegalovirus
cagcggcgctcaacatttcac

SEQ ID NO: 8780 - DNA, 22 bp, Human cytomegalovirus
tcagcatgtcttgagcatgcgg

SEQ ID NO: 8781 - DNA, 21 bp, Human cytomegalovirus
cctccccaactactactaccg

SEQ ID NO: 8782 - DNA, 23 bp, Human cytomegalovirus
ttactcgagcttattgagcgcag

SEQ ID NO: 8783 - DNA, 20 bp, Human cytomegalovirus
cacgtcgggcgttatgacac

SEQ ID NO: 8784 - DNA, 21 bp, Human cytomegalovirus
tcaacctcggtgctttttggg

SEQ ID NO: 8785 - DNA, 20 bp, Human cytomegalovirus
ctgtctgctcattctggcgg

SEQ ID NO: 8786 - DNA, 21 bp, Human cytomegalovirus
ttactcggggaacagttggcg

SEQ ID NO: 8787 - DNA, 20 bp, Human cytomegalovirus
atgatgaccgaccgcacgga

SEQ ID NO: 8788 - DNA, 21 bp, Human cytomegalovirus
tcacggtggctcgatacactg

SEQ ID NO: 8789 - DNA, 23 bp, Human cytomegalovirus
aagcttccttacagcataactgt

SEQ ID NO: 8790 - DNA, 27 bp, Human cytomegalovirus
ccttataacatgtattttgaaaaattg

SEQ ID NO: 8791 - DNA, 21 bp, Human cytomegalovirus
atgatacacgactaccactgg

SEQ ID NO: 8792 - DNA, 22 bp, Human cytomegalovirus
ttacgagcaagagttcatcacg

SEQ ID NO: 8793 - DNA, 19 bp, Human cytomegalovirus
ctgcgtgtcctcgctgggt

SEQ ID NO: 8794 - DNA, 21 bp, Human cytomegalovirus
tcacgagtccactcggaaagc

SEQ ID NO: 8795 - DNA, 20 bp, Human cytomegalovirus
ctcgtcttcttcggctccac

SEQ ID NO: 8796 - DNA, 22 bp, Human cytomegalovirus
ttaatcgtcgaaaaacgccgcg

SEQ ID NO: 8797 - DNA, 21 bp, Human cytomegalovirus
gatgcttgtaacgaaggcgtc

SEQ ID NO: 8798 - DNA, 22 bp, Human cytomegalovirus
ttactgagacttgttcctcagg

SEQ ID NO: 8799 - DNA, 21 bp, Human cytomegalovirus
gtagcctacactttggccacc

SEQ ID NO: 8800 - DNA, 22 bp, Human cytomegalovirus
ttactggtcagccttgcttcta

SEQ ID NO: 8801 - DNA, 18 bp, Human cytomegalovirus
acgtccctggtagacggg

SEQ ID NO: 8802 - DNA, 24 bp, Human cytomegalovirus
ttataagaaaagaagcacaagctc

SEQ ID NO: 8803 - DNA, 28 bp, Human cytomegalovirus
atgtattgttttctttttttacagaaag

SEQ ID NO: 8804 - DNA, 27 bp, Human cytomegalovirus
ttatattattatcaaaacgaaaaacag

SEQ ID NO: 8805 - DNA, 22 bp, Human cytomegalovirus
cttctcctttccttaatctcgg

SEQ ID NO: 8806 - DNA, 20 bp, Human cytomegalovirus
ctatacggagatcgcggtcc

SEQ ID NO: 8807 - DNA, 22 bp, Human cytomegalovirus
atgcatacatacacgcgtgcat

SEQ ID NO: 8808 - DNA, 22 bp, Human cytomegalovirus
ctaccatataaaaacgcagggg

SEQ ID NO: 8809 - DNA, 20 bp, Human cytomegalovirus
atgaaagcaagaggcagccg

SEQ ID NO: 8810 - DNA, 23 bp, Human cytomegalovirus
tcataaggtaacgatgctacttt

SEQ ID NO: 8811 - DNA, 21 bp, Human cytomegalovirus
atggactggcgatttacggtt

SEQ ID NO: 8812 - DNA, 22 bp, Human cytomegalovirus
ctacattgtgccatttctcagt

SEQ ID NO: 8813 - DNA, 23 bp, Human cytomegalovirus
atgaacaatctctggaaagcctg

SEQ ID NO: 8814 - DNA, 22 bp, Human cytomegalovirus
tcagcacacgaaaaaccgcatc

SEQ ID NO: 8815 - DNA, 21 bp, Human cytomegalovirus
atgaagccggtgttggtgctc

SEQ ID NO: 8816 - DNA, 22 bp, Human cytomegalovirus
ttaaataaatcgcagacgggcg

SEQ ID NO: 8817 - DNA, 22 bp, Human cytomegalovirus
atggatctcttgattcgtctcg

SEQ ID NO: 8818 - DNA, 22 bp, Human cytomegalovirus
tcaggagccacaacgtcgaatc

SEQ ID NO: 8819 - DNA, 20 bp, Human cytomegalovirus
cgcaaaacgctactggctcc

SEQ ID NO: 8820 - DNA, 22 bp, Human cytomegalovirus
tcaccactggtccgaaaacatc

SEQ ID NO: 8821 - DNA, 20 bp, Human cytomegalovirus
tacggctggtccgtcatcgt

SEQ ID NO: 8822 - DNA, 22 bp, Human cytomegalovirus
ttacaacaagctgaggagactc

SEQ ID NO: 8823 - DNA, 26 bp, Human cytomegalovirus
atgaccacctctacaaataatcaaac

SEQ ID NO: 8824 - DNA, 22 bp, Human cytomegalovirus
gtagaaacaagcgttgagtccc

SEQ ID NO: 8825 - DNA, 19 bp, Human cytomegalovirus
cgttgcggtgtctcagtcg

SEQ ID NO: 8826 - DNA, 21 bp, Human cytomegalovirus
tcatgctgtggtaccaggata

SEQ ID NO: 8827 - DNA, 5252 bp, Homo sapiens
ctctctcccagaacgtgtctctgctgcaaggcaccgggccctttcgctctgcagaactgcacttgcaagaccattatcaactcctaatcccagctcagaaagggagcctctgcgactcattcatcgccctccaggactgactgcattgcacagatgatggatatttacgtatgtttgaaacgaccatcctggatggtggacaataaaagaatgaggactgcttcaaatttccagtggctgttatcaacatttattcttctatatctaatgaatcaagtaaatagccagaaaaagggggctcctcatgatttgaagtgtgtaactaacaatttgcaagtgtggaactgttcttggaaagcaccctctggaacaggccgtggtactgattatgaagtttgcattgaaaacaggtcccgttcttgttatcagttggagaaaaccagtattaaaattccagctctttcacatggtgattatgaaataacaataaattctctacatgattttggaagttctacaagtaaattcacactaaatgaacaaaacgtttccttaattccagatactccagagatcttgaatttgtctgctgatttctcaacctctacattatacctaaagtggaacgacaggggttcagtttttccacaccgctcaaatgttatctgggaaattaaagttctacgtaaagagagtatggagctcgtaaaattagtgacccacaacacaactctgaatggcaaagatacacttcatcactggagttgggcctcagatatgcccttggaatgtgccattcattttgtggaaattagatgctacattgacaatcttcatttttctggtctcgaagagtggagtgactggagccctgtgaagaacatttcttggatacctgattctcagactaaggtttttcctcaagataaagtgatacttgtaggctcagacataacattttgttgtgtgagtcaagaaaaagtgttatcagcactgattggccatacaaactgccccttgatccatcttgatggggaaaatgttgcaatcaagattcgtaatatttctgtttctgcaagtagtggaacaaatgtagtttttacaaccgaagataacatatttggaaccgttatttttgctggatatccaccagatactcctcaacaactgaattgtgagacacatgatttaaaagaaattatatgtagttggaatccaggaagggtgacagcgttggtgggcccacgtgctacaagctacactttagttgaaagtttttcaggaaaatatgttagacttaaaagagctgaagcacctacaaacgaaagctatcaattattatttcaaatgcttccaaatcaagaaatatataattttactttgaatgctcacaatccgctgggtcgatcacaatcaacaattttagttaatataactgaaaaagtttatccccatactcctacttcattcaaagtgaaggatattaattcaacagctgttaaactttcttggcatttaccaggcaactttgcaaagattaattttttatgtgaaattgaaattaagaaatctaattcagtacaagagcagcggaatgtcacaatcaaaggagtagaaaattcaagttatcttgttgctctggacaagttaaatccatacactctatatacttttcggattcgttgttctactgaaactttctggaaatggagcaaatggagcaataaaaaacaacatttaacaacagaagccagtccttcaaaggggcctgatacttggagagagtggagttctgatggaaaaaatttaataatctattggaagcctttacccattaatgaagctaatggaaaaatactttcctacaatgtatcgtgttcatcagatgaggaaacacagtccctttctgaaatccctgatcctcagcacaaagcagagatacgacttgataagaatgactacatcatcagcgtagtggctaaaaattctgtgggctcatcaccaccttccaaaatagcgagtatggaaattccaaatgatgatctcaaaatagaacaagttgttgggatgggaaaggggattctcctcacctggcattacgaccccaacatgacttgcgactacgtcattaagtggtgtaactcgtctcggtcggaaccatgccttatggactggagaaaagttccctcaaacagcactgaaactgtaatagaatctgatgagtttcgaccaggtataagatataattttttcctgtatggatgcagaaatcaaggatatcaattattacgctccatgattggatatatagaagaattggctcccattgttgcaccaaattttactgttgaggatacttctgcagattcgatattagtaaaatgggaagacattcctgtggaagaacttagaggctttttaagaggatatttgttttactttggaaaaggagaaagagacacatctaagatgagggttttagaatcaggtcgttctgacataaaagttaagaatattactgacatatcccagaagacactgagaattgctgatcttcaaggtaaaacaagttaccacctggtcttgcgagcctatacagatggtggagtgggcccggagaagagtatgtatgtggtgacaaaggaaaattctgtgggattaattattgccattctcatcccagtggcagtggctgtcattgttggagtggtgacaagtatcctttgctatcggaaacgagaatggattaaagaaaccttctaccctgatattccaaatccagaaaactgtaaagcattacagtttcaaaagagtgtctgtgagggaagcagtgctcttaaaacattggaaatgaatccttgtaccccaaataatgttgaggttctggaaactcgatcagcatttcctaaaatagaagatacagaaataatttccccagtagctgagcgtcctgaagatcgctctgatgcagagcctgaaaaccatgtggttgtgtcctattgtccacccatcattgaggaagaaataccaaacccagccgcagatgaagctggagggactgcacaggttatttacattgatgttcagtcgatgtatcagcctcaagcaaaaccagaagaagaacaagaaaatgaccctgtaggaggggcaggctataagccacagatgcacctccccattaattctactgtggaagatatagctgcagaagaggacttagataaaactgcgggttacagacctcaggccaatgtaaatacatggaatttagtgtctccagactctcctagatccatagacagcaacagtgagattgtctcatttggaagtccatgctccattaattcccgacaatttttgattcctcctaaagatgaagactctcctaaatctaatggaggagggtggtcctttacaaacttttttcagaacaaaccaaacgattaacagtgtcaccgtgtcacttcagtcagccatctcaataagctcttactgctagtgttgctacatcagcactgggcattcttggagggatcctgtgaagtattgttaggaggtgaacttcactacatgttaagttacactgaaagttcatgtgcttttaatgtagtctaaaagccaaagtatagtgactcagaatcctcaatccacaaaactcaagattgggagctctttgtgatcaagccaaagaattctcatgtactctaccttcaagaagcatttcaaggctaatacctacttgtacgtacatgtaaaacaaatcccgccgcaactgttttctgttctgttgtttgtggttttctcatatgtatacttggtggaattgtaagtggatttgcaggccagggagaaaatgtccaagtaacaggtgaagtttatttgcctgacgtttactcctttctagatgaaaaccaagcacagattttaaaacttctaagattattctcctctatccacagcattcacaaaaattaatataatttttaatgtagtgacagcgatttagtgttttgtttgataaagtatgcttatttctgtgcctactgtataatggttatcaaacagttgtctcaggggtacaaactttgaaaacaagtgtgacactgaccagcccaaatcataatcatgttttcttgctgtgataggttttgcttgccttttcattattttttagcttttatgcttgcttccattatttcagttggttgccctaatatttaaaatttacacttctaagactagagacccacattttttaaaaatcattttattttgtgatacagtgacagctttatatgagcaaattcaatattattcataagcatgtaattccagtgacttactatgtgagatgactactaagcaatatctagcagcgttagttccatatagttctgattggatttcgttcctcctgaggagaccatgccgttgagcttggctacccaggcagtggtgatctttgacaccttctggtggatgttcctcccactcatgagtcttttcatcatgccacattatctgatccagtcctcacatttttaaatataaaactaaagagagaatgcttcttacaggaacagttacccaagggctgtttcttagtaactgtcataaactgatctggatccatgggcatacctgtgttcgaggtgcagcaattgcttggtgagctgtgcagaattgattgccttcagcacagcatcctctgcccacccttgtttctcataagcgatgtctggagtgattgtggttcttggaaaagcagaaggaaaaactaaaaagtgtatcttgtattttccctgccctcaggttgcctatgtattttaccttttcatatttaaggcaaaagtacttgaaaattttaagtgtccgaataagatatgtcttttttgtttgttttttttggttggttgtttgttttttatcatctgagattctgtaatgtatttgcaaataatggatcaattaattttttttgaagctcatattgtatctttttaaaaaccatgttgtggaaaaaagccagagtgacaagtgacaaaatctatttaggaactctgtgtatgaatcctgattttaactgctaggattcagctaaatttctgagctttatgatctgtggaaatttggaatgaaatcgaattcattttgtacatacatagtatattaaaactatataatagttcatagaaatgttcagtaatgaaaaaatatatccaatcagagccatcccgaaaaaaaaaaaaaaa

SEQ ID NO: 8828 - DNA, 5252 bp, Homo sapiens
  misc_feature (3967)..(3988): Masked repetitive sequence from Repeat Masker
ctctctcccagaacgtgtctctgctgcaaggcaccgggccctttcgctctgcagaactgcacttgcaagaccattatcaactcctaatcccagctcagaaagggagcctctgcgactcattcatcgccctccaggactgactgcattgcacagatgatggatatttacgtatgtttgaaacgaccatcctggatggtggacaataaaagaatgaggactgcttcaaatttccagtggctgttatcaacatttattcttctatatctaatgaatcaagtaaatagccagaaaaagggggctcctcatgatttgaagtgtgtaactaacaatttgcaagtgtggaactgttcttggaaagcaccctctggaacaggccgtggtactgattatgaagtttgcattgaaaacaggtcccgttcttgttatcagttggagaaaaccagtattaaaattccagctctttcacatggtgattatgaaataacaataaattctctacatgattttggaagttctacaagtaaattcacactaaatgaacaaaacgtttccttaattccagatactccagagatcttgaatttgtctgctgatttctcaacctctacattatacctaaagtggaacgacaggggttcagtttttccacaccgctcaaatgttatctgggaaattaaagttctacgtaaagagagtatggagctcgtaaaattagtgacccacaacacaactctgaatggcaaagatacacttcatcactggagttgggcctcagatatgcccttggaatgtgccattcattttgtggaaattagatgctacattgacaatcttcatttttctggtctcgaagagtggagtgactggagccctgtgaagaacatttcttggatacctgattctcagactaaggtttttcctcaagataaagtgatacttgtaggctcagacataacattttgttgtgtgagtcaagaaaaagtgttatcagcactgattggccatacaaactgccccttgatccatcttgatggggaaaatgttgcaatcaagattcgtaatatttctgtttctgcaagtagtggaacaaatgtagtttttacaaccgaagataacatatttggaaccgttatttttgctggatatccaccagatactcctcaacaactgaattgtgagacacatgatttaaaagaaattatatgtagttggaatccaggaagggtgacagcgttggtgggcccacgtgctacaagctacactttagttgaaagtttttcaggaaaatatgttagacttaaaagagctgaagcacctacaaacgaaagctatcaattattatttcaaatgcttccaaatcaagaaatatataattttactttgaatgctcacaatccgctgggtcgatcacaatcaacaattttagttaatataactgaaaaagtttatccccatactcctacttcattcaaagtgaaggatattaattcaacagctgttaaactttcttggcatttaccaggcaactttgcaaagattaattttttatgtgaaattgaaattaagaaatctaattcagtacaagagcagcggaatgtcacaatcaaaggagtagaaaattcaagttatcttgttgctctggacaagttaaatccatacactctatatacttttcggattcgttgttctactgaaactttctggaaatggagcaaatggagcaataaaaaacaacatttaacaacagaagccagtccttcaaaggggcctgatacttggagagagtggagttctgatggaaaaaatttaataatctattggaagcctttacccattaatgaagctaatggaaaaatactttcctacaatgtatcgtgttcatcagatgaggaaacacagtccctttctgaaatccctgatcctcagcacaaagcagagatacgacttgataagaatgactacatcatcagcgtagtggctaaaaattctgtgggctcatcaccaccttccaaaatagcgagtatggaaattccaaatgatgatctcaaaatagaacaagttgttgggatgggaaaggggattctcctcacctggcattacgaccccaacatgacttgcgactacgtcattaagtggtgtaactcgtctcggtcggaaccatgccttatggactggagaaaagttccctcaaacagcactgaaactgtaatagaatctgatgagtttcgaccaggtataagatataattttttcctgtatggatgcagaaatcaaggatatcaattattacgctccatgattggatatatagaagaattggctcccattgttgcaccaaattttactgttgaggatacttctgcagattcgatattagtaaaatgggaagacattcctgtggaagaacttagaggctttttaagaggatatttgttttactttggaaaaggagaaagagacacatctaagatgagggttttagaatcaggtcgttctgacataaaagttaagaatattactgacatatcccagaagacactgagaattgctgatcttcaaggtaaaacaagttaccacctggtcttgcgagcctatacagatggtggagtgggcccggagaagagtatgtatgtggtgacaaaggaaaattctgtgggattaattattgccattctcatcccagtggcagtggctgtcattgttggagtggtgacaagtatcctttgctatcggaaacgagaatggattaaagaaaccttctaccctgatattccaaatccagaaaactgtaaagcattacagtttcaaaagagtgtctgtgagggaagcagtgctcttaaaacattggaaatgaatccttgtaccccaaataatgttgaggttctggaaactcgatcagcatttcctaaaatagaagatacagaaataatttccccagtagctgagcgtcctgaagatcgctctgatgcagagcctgaaaaccatgtggttgtgtcctattgtccacccatcattgaggaagaaataccaaacccagccgcagatgaagctggagggactgcacaggttatttacattgatgttcagtcgatgtatcagcctcaagcaaaaccagaagaagaacaagaaaatgaccctgtaggaggggcaggctataagccacagatgcacctccccattaattctactgtggaagatatagctgcagaagaggacttagataaaactgcgggttacagacctcaggccaatgtaaatacatggaatttagtgtctccagactctcctagatccatagacagcaacagtgagattgtctcatttggaagtccatgctccattaattcccgacaatttttgattcctcctaaagatgaagactctcctaaatctaatggaggagggtggtcctttacaaacttttttcagaacaaaccaaacgattaacagtgtcaccgtgtcacttcagtcagccatctcaataagctcttactgctagtgttgctacatcagcactgggcattcttggagggatcctgtgaagtattgttaggaggtgaacttcactacatgttaagttacactgaaagttcatgtgcttttaatgtagtctaaaagccaaagtatagtgactcagaatcctcaatccacaaaactcaagattgggagctctttgtgatcaagccaaagaattctcatgtactctaccttcaagaagcatttcaaggctaatacctacttgtacgtacatgtaaaacaaatcccgccgcaactgttttctgttctgttgtttgtggttttctcatatgtatacttggtggaattgtaagtggatttgcaggccagggagaaaatgtccaagtaacaggtgaagtttatttgcctgacgtttactcctttctagatgaaaaccaagcacagattttaaaacttctaagattattctcctctatccacagcattcacnnnnnnnnnnnnnnnnnnnnnngtagtgacagcgatttagtgttttgtttgataaagtatgcttatttctgtgcctactgtataatggttatcaaacagttgtctcaggggtacaaactttgaaaacaagtgtgacactgaccagcccaaatcataatcatgttttcttgctgtgataggttttgcttgccttttcattattttttagcttttatgcttgcttccattatttcagttggttgccctaatatttaaaatttacacttctaagactagagacccacattttttaaaaatcattttattttgtgatacagtgacagctttatatgagcaaattcaatattattcataagcatgtaattccagtgacttactatgtgagatgactactaagcaatatctagcagcgttagttccatatagttctgattggatttcgttcctcctgaggagaccatgccgttgagcttggctacccaggcagtggtgatctttgacaccttctggtggatgttcctcccactcatgagtcttttcatcatgccacattatctgatccagtcctcacatttttaaatataaaactaaagagagaatgcttcttacaggaacagttacccaagggctgtttcttagtaactgtcataaactgatctggatccatgggcatacctgtgttcgaggtgcagcaattgcttggtgagctgtgcagaattgattgccttcagcacagcatcctctgcccacccttgtttctcataagcgatgtctggagtgattgtggttcttggaaaagcagaaggaaaaactaaaaagtgtatcttgtattttccctgccctcaggttgcctatgtattttaccttttcatatttaaggcaaaagtacttgaaaattttaagtgtccgaataagatatgtcttttttgtttgttttttttggttggttgtttgttttttatcatctgagattctgtaatgtatttgcaaataatggatcaattaattttttttgaagctcatattgtatctttttaaaaaccatgttgtggaaaaaagccagagtgacaagtgacaaaatctatttaggaactctgtgtatgaatcctgattttaactgctaggattcagctaaatttctgagctttatgatctgtggaaatttggaatgaaatcgaattcattttgtacatacatagtatattaaaactatataatagttcatagaaatgttcagtaatgaaaaaatatatccaatcagagccatcccgaaaaaaaaaaaaaaa

SEQ ID NO: 8829 - DNA, 841 bp, Homo sapiens
ttttttttttttttcttaaatagcatttattttctctcaaaaagcctattatgtactaacaagtgttcctctaaattagaaaggcatcactactaaaattttatacatattttttatataagagaaggaatattgggttacaatctgaatttctctttatgatttctcttaaagtatagaacagctattaaaatgactaatattgctaaaatgaaggctactaaatttccccaagaatttcggtggaatgcccaaaaatggtgttaagatatgcagaagggcccatttcaagcaaagcaatctctccaccccttcataaaagatttaagctaaaaaaaaaaaaaaaagaagaaaatccaacagctgaagacattgggctatttataaatcttctcccagtcccccagacagcctcacatgggggctgtaaacagctaactaaaatatctttgagactcttatgtccacacccactgacacaaggagagctgtaaccacagtgaaactagactttgctttcctttagcaagtatgtgcctatgatagtaaactggagtaaatgtaacagtaataaaacaaattttttttaaaaataaaaattatacctttttctccaacaaacggtaaagaccacgtgaagacatccataaaattaggcaaccagtaaagatgtggagaaccagtaaactgtcgaaattcatcacattattttcatactttaatacagcagctttaattattggagaacatcaaagtaattaggtgccgaaaaacattgttattaatgaagggaacccctgacgtttgaccttttctgtaccatctatagccctggacttga

SEQ ID NO: 8830 - DNA, 841 bp, Homo sapiens
  misc_feature (94)..(121): Masked repetitive sequence
  misc_feature (569)..(604): Masked repetitive sequence
ttttttttttttttcttaaatagcatttattttctctcaaaaagcctattatgtactaacaagtgttcctctaaattagaaaggcatcactacnnnnnnnnnnnnnnnnnnnnnnnnnnnngagaaggaatattgggttacaatctgaatttctctttatgatttctcttaaagtatagaacagctattaaaatgactaatattgctaaaatgaaggctactaaatttccccaagaatttcggtggaatgcccaaaaatggtgttaagatatgcagaagggcccatttcaagcaaagcaatctctccaccccttcataaaagatttaagctaaaaaaaaaaaaaaaagaagaaaatccaacagctgaagacattgggctatttataaatcttctcccagtcccccagacagcctcacatgggggctgtaaacagctaactaaaatatctttgagactcttatgtccacacccactgacacaaggagagctgtaaccacagtgaaactagactttgctttcctttagcaagtatgtgcctatgatagtaaactggagtaaatgtaacagnnnnnnnnnnnnnnnnnnnnnnnnnnnnnnnnnnnncctttttctccaacaaacggtaaagaccacgtgaagacatccataaaattaggcaaccagtaaagatgtggagaaccagtaaactgtcgaaattcatcacattattttcatactttaatacagcagctttaattattggagaacatcaaagtaattaggtgccgaaaaacattgttattaatgaagggaacccctgacgtttgaccttttctgtaccatctatagccctggacttga

SEQ ID NO: 8831 - DNA, 63 bp, Artificial Sequence
  T7T24 Primer
ggccagtgaattgtaatacgactcactatagggaggcggtttttttttttttttttttttttt

SEQ ID NO: 8832 - DNA, 1010 bp, Homo sapiens; identical to SEQ ID NO: 8770
  misc_feature (213)..(213): n = A, C, G or T
  misc_feature (491)..(551): masked repetitive sequence
  misc_feature (601)..(601): n = A, C, G or T
  misc_feature (761)..(761): n = A, C, G or T
